United States Patent Application Publication US 2011/0165568 A1 - sequence listing, part 3

SEQ ID NO: 1695 - DNA, 5076356 bp, Escherichia coli (residues 1-1,269,089 of 5,076,356)
  Strain O55:H7
  modified_base (225)..(225): a, c, g or t
  modified_base (1111)..(1112): a, c, g or t
  modified_base (1607)..(1622): a, c, g or t
  modified_base (4457)..(4460): a, c, g or t
  modified_base (6633)..(6633): a, c, g or t
  modified_base (7135)..(7139): a, c, g or t
  modified_base (11714)..(11714): a, c, g or t
  modified_base (12007)..(12009): a, c, g or t
  modified_base (12012)..(12013): a, c, g or t
  modified_base (13584)..(13585): a, c, g or t
  modified_base (15530)..(15530): a, c, g or t
  modified_base (15818)..(15821): a, c, g or t
  modified_base (18780)..(18789): a, c, g or t
  modified_base (19304)..(19308): a, c, g or t
  modified_base (19732)..(19743): a, c, g or t
  modified_base (24367)..(24373): a, c, g or t
  modified_base (24782)..(24785): a, c, g or t
  modified_base (25579)..(25595): a, c, g or t
  modified_base (28480)..(28480): a, c, g or t
  modified_base (29283)..(29286): a, c, g or t
  modified_base (29291)..(29295): a, c, g or t
  modified_base (31649)..(31652): a, c, g or t
  modified_base (34426)..(34426): a, c, g or t
  modified_base (36376)..(36379): a, c, g or t
  modified_base (36381)..(36384): a, c, g or t
  modified_base (36889)..(36889): a, c, g or t
  modified_base (39884)..(39884): a, c, g or t
  modified_base (45140)..(45140): a, c, g or t
  modified_base (45551)..(45551): a, c, g or t
  modified_base (45915)..(45920): a, c, g or t
  modified_base (46403)..(46407): a, c, g or t
  modified_base (48459)..(48459): a, c, g or t
  modified_base (49809)..(49809): a, c, g or t
  modified_base (50356)..(50356): a, c, g or t
  modified_base (52612)..(52612): a, c, g or t
  modified_base (56077)..(56077): a, c, g or t
  modified_base (58998)..(58998): a, c, g or t
  modified_base (62027)..(62027): a, c, g or t
  modified_base (64105)..(64108): a, c, g or t
  modified_base (64241)..(64241): a, c, g or t
  modified_base (67678)..(67678): a, c, g or t
  modified_base (67797)..(67801): a, c, g or t
  modified_base (71722)..(71722): a, c, g or t
  modified_base (73394)..(73397): a, c, g or t
  modified_base (73688)..(73688): a, c, g or t
  modified_base (74659)..(74659): a, c, g or t
  modified_base (87797)..(87797): a, c, g or t
  modified_base (97642)..(97646): a, c, g or t
  modified_base (98093)..(98093): a, c, g or t
  modified_base (98096)..(98096): a, c, g or t
  modified_base (102287)..(102287): a, c, g or t
  modified_base (105479)..(105479): a, c, g or t
  modified_base (106453)..(106455): a, c, g or t
  modified_base (106458)..(106459): a, c, g or t
  modified_base (109656)..(109657): a, c, g or t
  modified_base (123248)..(123250): a, c, g or t
  modified_base (126289)..(126299): a, c, g or t
  modified_base (129221)..(129221): a, c, g or t
  modified_base (130490)..(130493): a, c, g or t
  modified_base (130923)..(130926): a, c, g or t
  modified_base (135751)..(135751): a, c, g or t
  modified_base (137716)..(137716): a, c, g or t
  modified_base (140865)..(140865): a, c, g or t
  modified_base (143774)..(143777): a, c, g or t
  modified_base (147543)..(147546): a, c, g or t
  modified_base (149125)..(149125): a, c, g or t
  modified_base (151097)..(151098): a, c, g or t
  modified_base (156722)..(156722): a, c, g or t
  modified_base (157927)..(157927): a, c, g or t
  modified_base (159008)..(159008): a, c, g or t
  modified_base (162533)..(162533): a, c, g or t
  modified_base (163259)..(163259): a, c, g or t
  modified_base (163398)..(163398): a, c, g or t
  modified_base (165153)..(165153): a, c, g or t
  modified_base (167388)..(167388): a, c, g or t
  modified_base (175680)..(175681): a, c, g or t
  modified_base (175684)..(175684): a, c, g or t
  modified_base (175965)..(175965): a, c, g or t
  modified_base (177693)..(177693): a, c, g or t
  modified_base (177719)..(177722): a, c, g or t
  modified_base (177724)..(177725): a, c, g or t
  modified_base (179857)..(179870): a, c, g or t
  modified_base (179961)..(179961): a, c, g or t
  modified_base (180353)..(180353): a, c, g or t
  modified_base (190146)..(190149): a, c, g or t
  modified_base (191703)..(191703): a, c, g or t
  modified_base (195215)..(195223): a, c, g or t
  modified_base (198174)..(198174): a, c, g or t
  modified_base (198179)..(198179): a, c, g or t
  modified_base (204512)..(204515): a, c, g or t
  modified_base (205797)..(205804): a, c, g or t
  modified_base (207917)..(207917): a, c, g or t
  modified_base (210045)..(210045): a, c, g or t
  modified_base (210819)..(210819): a, c, g or t
  modified_base (212694)..(212694): a, c, g or t
  modified_base (212776)..(212776): a, c, g or t
  modified_base (212965)..(212965): a, c, g or t
  modified_base (214546)..(214549): a, c, g or t
  modified_base (216428)..(216433): a, c, g or t
  modified_base (218731)..(218731): a, c, g or t
  modified_base (228787)..(228788): a, c, g or t
  modified_base (228790)..(228791): a, c, g or t
  modified_base (229036)..(229037): a, c, g or t
  modified_base (229040)..(229069): a, c, g or t
  modified_base (229154)..(229168): a, c, g or t
  modified_base (229208)..(229208): a, c, g or t
  modified_base (229215)..(229226): a, c, g or t
  modified_base (229412)..(229412): a, c, g or t
  modified_base (229728)..(229736): a, c, g or t
  modified_base (229739)..(229742): a, c, g or t
  modified_base (229828)..(229831): a, c, g or t
  modified_base (230070)..(230078): a, c, g or t
  modified_base (230311)..(230311): a, c, g or t
  modified_base (231196)..(231196): a, c, g or t
  modified_base (237010)..(237013): a, c, g or t
  modified_base (240337)..(240337): a, c, g or t
  modified_base (240732)..(240732): a, c, g or t
  modified_base (240744)..(240744): a, c, g or t
  modified_base (243277)..(243289): a, c, g or t
  modified_base (243525)..(243525): a, c, g or t
  modified_base (243527)..(243528): a, c, g or t
  modified_base (243532)..(243532): a, c, g or t
  modified_base (245081)..(245081): a, c, g or t
  modified_base (247553)..(247553): a, c, g or t
  modified_base (247879)..(247879): a, c, g or t
  modified_base (248819)..(248830): a, c, g or t
  modified_base (253042)..(253042): a, c, g or t
  modified_base (255707)..(255716): a, c, g or t
  modified_base (255719)..(255719): a, c, g or t
  modified_base (256708)..(256711): a, c, g or t
  modified_base (260660)..(260660): a, c, g or t
  modified_base (261192)..(261193): a, c, g or t
  modified_base (261196)..(261197): a, c, g or t
  modified_base (261199)..(261199): a, c, g or t
  modified_base (261205)..(261206): a, c, g or t
  modified_base (261208)..(261210): a, c, g or t
  modified_base (261940)..(261941): a, c, g or t
  modified_base (266146)..(266146): a, c, g or t
  modified_base (267741)..(267741): a, c, g or t
  modified_base (267796)..(267797): a, c, g or t
  modified_base (268132)..(268141): a, c, g or t
  modified_base (268537)..(268540): a, c, g or t
  modified_base (268542)..(268542): a, c, g or t
  modified_base (268544)..(268547): a, c, g or t
  modified_base (269632)..(269634): a, c, g or t
  modified_base (269812)..(269812): a, c, g or t
  modified_base (269863)..(269863): a, c, g or t
  modified_base (269872)..(269872): a, c, g or t
  modified_base (269914)..(269914): a, c, g or t
  modified_base (269956)..(269956): a, c, g or t
  modified_base (269971)..(269971): a, c, g or t
  modified_base (270076)..(270076): a, c, g or t
  modified_base (270552)..(270552): a, c, g or t
  modified_base (270736)..(270736): a, c, g or t
  modified_base (271053)..(271060): a, c, g or t
  modified_base (271415)..(271416): a, c, g or t
  modified_base (271418)..(271420): a, c, g or t
  modified_base (271424)..(271425): a, c, g or t
  modified_base (272354)..(272367): a, c, g or t
  modified_base (273879)..(273879): a, c, g or t
  modified_base (274206)..(274206): a, c, g or t
  modified_base (274218)..(274218): a, c, g or t
  modified_base (274262)..(274263): a, c, g or t
  modified_base (274268)..(274277): a, c, g or t
  modified_base (274290)..(274290): a, c, g or t
  modified_base (274520)..(274520): a, c, g or t
  modified_base (276072)..(276072): a, c, g or t
  modified_base (277861)..(277862): a, c, g or t
  modified_base (278820)..(278835): a, c, g or t
  modified_base (282709)..(282714): a, c, g or t
  modified_base (282716)..(282721): a, c, g or t
  modified_base (283381)..(283381): a, c, g or t
  modified_base (283843)..(283843): a, c, g or t
  modified_base (284031)..(284031): a, c, g or t
  modified_base (284034)..(284037): a, c, g or t
  modified_base (284549)..(284552): a, c, g or t
  modified_base (284555)..(284555): a, c, g or t
  modified_base (284906)..(284906): a, c, g or t
  modified_base (285347)..(285348): a, c, g or t
  modified_base (285435)..(285435): a, c, g or t
  modified_base (286072)..(286072): a, c, g or t
  modified_base (286092)..(286092): a, c, g or t
  modified_base (286347)..(286350): a, c, g or t
  modified_base (286488)..(286488): a, c, g or t
  modified_base (286495)..(286495): a, c, g or t
  modified_base (287082)..(287085): a, c, g or t
  modified_base (292203)..(292203): a, c, g or t
  modified_base (294246)..(294246): a, c, g or t
  modified_base (294298)..(294299): a, c, g or t
  modified_base (295226)..(295226): a, c, g or t
  modified_base (295860)..(295869): a, c, g or t
  modified_base (295871)..(295871): a, c, g or t
  modified_base (296561)..(296564): a, c, g or t
  modified_base (296724)..(296724): a, c, g or t
  modified_base (296941)..(296944): a, c, g or t
  modified_base (297024)..(297027): a, c, g or t
  modified_base (298421)..(298421): a, c, g or t
  modified_base (298681)..(298681): a, c, g or t
  modified_base (304726)..(304727): a, c, g or t
  modified_base (304729)..(304731): a, c, g or t
  modified_base (304734)..(304737): a, c, g or t
  modified_base (304763)..(304773): a, c, g or t
  modified_base (304775)..(304776): a, c, g or t
  modified_base (304890)..(304912): a, c, g or t
  modified_base (304916)..(304917): a, c, g or t
  modified_base (304963)..(304971): a, c, g or t
  modified_base (305015)..(305024): a, c, g or t
  modified_base (305072)..(305073): a, c, g or t
  modified_base (305152)..(305179): a, c, g or t
  modified_base (305204)..(305218): a, c, g or t
  modified_base (305263)..(305273): a, c, g or t
  modified_base (305275)..(305276): a, c, g or t
  modified_base (305280)..(305281): a, c, g or t
  modified_base (305343)..(305364): a, c, g or t
  modified_base (305399)..(305414): a, c, g or t
  modified_base (305416)..(305417): a, c, g or t
  modified_base (305464)..(305639): a, c, g or t
  modified_base (305667)..(305762): a, c, g or t
  modified_base (305777)..(305778): a, c, g or t
  modified_base (305780)..(305784): a, c, g or t
  modified_base (305786)..(305820): a, c, g or t
  modified_base (305822)..(305823): a, c, g or t
  modified_base (305848)..(305851): a, c, g or t
  modified_base (305853)..(305854): a, c, g or t
  modified_base (305876)..(305876): a, c, g or t
  modified_base (305885)..(305886): a, c, g or t
  modified_base (305897)..(305901): a, c, g or t
  modified_base (305912)..(305915): a, c, g or t
  modified_base (305922)..(305923): a, c, g or t
  modified_base (305948)..(306104): a, c, g or t
  modified_base (306140)..(306141): a, c, g or t
  modified_base (306145)..(306146): a, c, g or t
  modified_base (306149)..(306168): a, c, g or t
  modified_base (306200)..(306201): a, c, g or t
  modified_base (306207)..(306227): a, c, g or t
  modified_base (306230)..(306230): a, c, g or t
  modified_base (306268)..(306271): a, c, g or t
  modified_base (306273)..(306274): a, c, g or t
  modified_base (306280)..(306281): a, c, g or t
  modified_base (306358)..(306367): a, c, g or t
  modified_base (306403)..(306433): a, c, g or t
  modified_base (306443)..(306446): a, c, g or t
  modified_base (306764)..(306766): a, c, g or t
  modified_base (307285)..(307286): a, c, g or t
  modified_base (307320)..(307327): a, c, g or t
  modified_base (307386)..(307387): a, c, g or t
  modified_base (307389)..(307391): a, c, g or t
  modified_base (307527)..(307537): a, c, g or t
  modified_base (307564)..(307568): a, c, g or t
  modified_base (307595)..(307634): a, c, g or t
  modified_base (307665)..(307666): a, c, g or t
  modified_base (307672)..(307683): a, c, g or t
  modified_base (307707)..(307761): a, c, g or t
  modified_base (307772)..(307775): a, c, g or t
  modified_base (307778)..(307779): a, c, g or t
  modified_base (307783)..(307861): a, c, g or t
  modified_base (307866)..(307868): a, c, g or t
  modified_base (307884)..(307885): a, c, g or t
  modified_base (307887)..(307887): a, c, g or t
  modified_base (307891)..(307891): a, c, g or t
  modified_base (307894)..(307895): a, c, g or t
  modified_base (307906)..(307933): a, c, g or t
  modified_base (307966)..(307985): a, c, g or t
  modified_base (307999)..(308000): a, c, g or t
  modified_base (308002)..(308003): a, c, g or t
  modified_base (308009)..(309178): a, c, g or t
  modified_base (309184)..(309184): a, c, g or t
  modified_base (309239)..(309278): a, c, g or t
  modified_base (309329)..(309402): a, c, g or t
  modified_base (309435)..(309435): a, c, g or t
  modified_base (309438)..(309477): a, c, g or t
  modified_base (309518)..(309936): a, c, g or t
  modified_base (310016)..(310017): a, c, g or t
  modified_base (310024)..(310033): a, c, g or t
  modified_base (310913)..(310919): a, c, g or t
  modified_base (310922)..(310924): a, c, g or t
  modified_base (311531)..(311534): a, c, g or t
  modified_base (311566)..(311569): a, c, g or t
  modified_base (311573)..(311574): a, c, g or t
  modified_base (311807)..(311808): a, c, g or t
  modified_base (311810)..(311813): a, c, g or t
  modified_base (312447)..(312457): a, c, g or t
  modified_base (313403)..(313416): a, c, g or t
  modified_base (313418)..(313419): a, c, g or t
  modified_base (313884)..(313894): a, c, g or t
  modified_base (314606)..(314609): a, c, g or t
  modified_base (314674)..(314674): a, c, g or t
  modified_base (314676)..(314680): a, c, g or t
  modified_base (316676)..(316692): a, c, g or t
  modified_base (316698)..(316699): a, c, g or t
  modified_base (317909)..(317909): a, c, g or t
  modified_base (324770)..(324773): a, c, g or t
  modified_base (326578)..(326581): a, c, g or t
  modified_base (330166)..(330167): a, c, g or t
  modified_base (330171)..(330171): a, c, g or t
  modified_base (330291)..(330291): a, c, g or t
  modified_base (330295)..(330298): a, c, g or t
  modified_base (331037)..(331037): a, c, g or t
  modified_base (331725)..(331725): a, c, g or t
  modified_base (332259)..(332259): a, c, g or t
  modified_base (332452)..(332452): a, c, g or t
  modified_base (334197)..(334200): a, c, g or t
  modified_base (342348)..(342348): a, c, g or t
  modified_base (343288)..(343288): a, c, g or t
  modified_base (344101)..(344104): a, c, g or t
  modified_base (344218)..(344218): a, c, g or t
  modified_base (344906)..(344921): a, c, g or t
  modified_base (346625)..(346629): a, c, g or t
  modified_base (346740)..(346741): a, c, g or t
  modified_base (346744)..(346757): a, c, g or t
  modified_base (350138)..(350138): a, c, g or t
  modified_base (350515)..(350518): a, c, g or t
  modified_base (360799)..(360805): a, c, g or t
  modified_base (360840)..(360840): a, c, g or t
  modified_base (360843)..(360849): a, c, g or t
  modified_base (360924)..(360937): a, c, g or t
  modified_base (361000)..(361001): a, c, g or t
  modified_base (361007)..(361009): a, c, g or t
  modified_base (361024)..(361037): a, c, g or t
  modified_base (361084)..(361085): a, c, g or t
  modified_base (361111)..(361112): a, c, g or t
  modified_base (361148)..(361216): a, c, g or t
  modified_base (361218)..(361221): a, c, g or t
  modified_base (361249)..(361264): a, c, g or t
  modified_base (361267)..(361267): a, c, g or t
  modified_base (361272)..(361273): a, c, g or t
  modified_base (361324)..(361339): a, c, g or t
  modified_base (361372)..(361373): a, c, g or t
  modified_base (361386)..(361407): a, c, g or t
  modified_base (361444)..(361472): a, c, g or t
  modified_base (361501)..(361502): a, c, g or t
  modified_base (361508)..(361508): a, c, g or t
  modified_base (366317)..(366317): a, c, g or t
  modified_base (368420)..(368420): a, c, g or t
  modified_base (368664)..(368667): a, c, g or t
  modified_base (368683)..(368686): a, c, g or t
  modified_base (370850)..(370851): a, c, g or t
  modified_base (370853)..(370854): a, c, g or t
  modified_base (370951)..(370951): a, c, g or t
  modified_base (371696)..(371696): a, c, g or t
  modified_base (373758)..(373758): a, c, g or t
  modified_base (373761)..(373761): a, c, g or t
  modified_base (373764)..(373767): a, c, g or t
  modified_base (374657)..(374657): a, c, g or t
  modified_base (377547)..(377547): a, c, g or t
  modified_base (377828)..(377828): a, c, g or t
  modified_base (378755)..(378755): a, c, g or t
  modified_base (382559)..(382560): a, c, g or t
  modified_base (386132)..(386132): a, c, g or t
  modified_base (389637)..(389637): a, c, g or t
  modified_base (389641)..(389642): a, c, g or t
  modified_base (389646)..(389647): a, c, g or t
  modified_base (389735)..(389735): a, c, g or t
  modified_base (389776)..(389785): a, c, g or t
  modified_base (389830)..(389831): a, c, g or t
  modified_base (389834)..(389877): a, c, g or t
  modified_base (389955)..(389960): a, c, g or t
  modified_base (389962)..(389962): a, c, g or t
  modified_base (390778)..(390778): a, c, g or t
  modified_base (391623)..(391625): a, c, g or t
  modified_base (391627)..(391628): a, c, g or t
  modified_base (393297)..(393303): a, c, g or t
  modified_base (393330)..(393330): a, c, g or t
  modified_base (394648)..(394648): a, c, g or t
  modified_base (398494)..(398494): a, c, g or t
  modified_base (405814)..(405814): a, c, g or t
  modified_base (406131)..(406134): a, c, g or t
  modified_base (409507)..(409538): a, c, g or t
  modified_base (409540)..(409541): a, c, g or t
  modified_base (409545)..(409546): a, c, g or t
  modified_base (409585)..(409594): a, c, g or t
  modified_base (409597)..(409598): a, c, g or t
  modified_base (409600)..(409601): a, c, g or t
  modified_base (409699)..(409720): a, c, g or t
  modified_base (409804)..(409805): a, c, g or t
  modified_base (409807)..(409808): a, c, g or t
  modified_base (409817)..(409817): a, c, g or t
  modified_base (409994)..(409994): a, c, g or t
  modified_base (410767)..(410767): a, c, g or t
  modified_base (412002)..(412002): a, c, g or t
  modified_base (414113)..(414115): a, c, g or t
  modified_base (420680)..(420680): a, c, g or t
  modified_base (422928)..(422928): a, c, g or t
  modified_base (424581)..(424587): a, c, g or t
  modified_base (425009)..(425009): a, c, g or t
  modified_base (430568)..(430568): a, c, g or t
  modified_base (431238)..(431238): a, c, g or t
  modified_base (431673)..(431674): a, c, g or t
  modified_base (431712)..(431712): a, c, g or t
  modified_base (431714)..(431715): a, c, g or t
  modified_base (431718)..(431718): a, c, g or t
  modified_base (431721)..(431722): a, c, g or t
  modified_base (431724)..(431733): a, c, g or t
  modified_base (431801)..(431812): a, c, g or t
  modified_base (431870)..(431871): a, c, g or t
  modified_base (431880)..(431881): a, c, g or t
  modified_base (433497)..(433500): a, c, g or t
  modified_base (435245)..(435273): a, c, g or t
  modified_base (436838)..(436839): a, c, g or t
  modified_base (437180)..(437188): a, c, g or t
  modified_base (437246)..(437246): a, c, g or t
  modified_base (437254)..(437254): a, c, g or t
  modified_base (444573)..(444574): a, c, g or t
  modified_base (445269)..(445272): a, c, g or t
  modified_base (446567)..(446567): a, c, g or t
  modified_base (446570)..(446570): a, c, g or t
  modified_base (448260)..(448260): a, c, g or t
  modified_base (452260)..(452260): a, c, g or t
  modified_base (453631)..(453633): a, c, g or t
  modified_base (455001)..(455002): a, c, g or t
  modified_base (456601)..(456602): a, c, g or t
  modified_base (456706)..(456709): a, c, g or t
  modified_base (457324)..(457325): a, c, g or t
  modified_base (459190)..(459192): a, c, g or t
  modified_base (459509)..(459510): a, c, g or t
  modified_base (459932)..(459933): a, c, g or t
  modified_base (459935)..(459935): a, c, g or t
  modified_base (460101)..(460101): a, c, g or t
  modified_base (460302)..(460302): a, c, g or t
  modified_base (461957)..(461958): a, c, g or t
  modified_base (463755)..(463755): a, c, g or t
  modified_base (464450)..(464450): a, c, g or t
  modified_base (469521)..(469528): a, c, g or t
  modified_base (469534)..(469534): a, c, g or t
  modified_base (470340)..(470343): a, c, g or t
  modified_base (473677)..(473677): a, c, g or t
  modified_base (475254)..(475256): a, c, g or t
  modified_base (480476)..(480476): a, c, g or t
  modified_base (482682)..(482682): a, c, g or t
  modified_base (483928)..(483928): a, c, g or t
  modified_base (483936)..(483936): a, c, g or t
  modified_base (484962)..(484962): a, c, g or t
  modified_base (485004)..(485004): a, c, g or t
  modified_base (486932)..(486938): a, c, g or t
  modified_base (486940)..(486940): a, c, g or t
  modified_base (486943)..(486944): a, c, g or t
  modified_base (486946)..(486946): a, c, g or t
  modified_base (487275)..(487284): a, c, g or t
  modified_base (488394)..(488394): a, c, g or t
  modified_base (489172)..(489178): a, c, g or t
  modified_base (489695)..(489698): a, c, g or t
  modified_base (494041)..(494041): a, c, g or t
  modified_base (495979)..(495986): a, c, g or t
  modified_base (497052)..(497052): a, c, g or t
  modified_base (498411)..(498411): a, c, g or t
  modified_base (502101)..(502101): a, c, g or t
  modified_base (504009)..(504020): a, c, g or t
  modified_base (504027)..(504027): a, c, g or t
  modified_base (504412)..(504412): a, c, g or t
  modified_base (506096)..(506096): a, c, g or t
  modified_base (507368)..(507373): a, c, g or t
  modified_base (514651)..(514651): a, c, g or t
  modified_base (515641)..(515641): a, c, g or t
  modified_base (517751)..(517751): a, c, g or t
  modified_base (521970)..(521970): a, c, g or t
  modified_base (523669)..(523672): a, c, g or t
  modified_base (524444)..(524444): a, c, g or t
  modified_base (528416)..(528418): a, c, g or t
  modified_base (528721)..(528724): a, c, g or t
  modified_base (530494)..(530494): a, c, g or t
  modified_base (540682)..(540685): a, c, g or t
  modified_base (543863)..(543864): a, c, g or t
  modified_base (555114)..(555114): a, c, g or t
  modified_base (557029)..(557029): a, c, g or t
  modified_base (559224)..(559224): a, c, g or t
  modified_base (560219)..(560223): a, c, g or t
  modified_base (565972)..(565972): a, c, g or t
  modified_base (567531)..(567531): a, c, g or t
  modified_base (568889)..(568889): a, c, g or t
  modified_base (571294)..(571294): a, c, g or t
  modified_base (573022)..(573028): a, c, g or t
  modified_base (574806)..(574806): a, c, g or t
  modified_base (578383)..(578383): a, c, g or t
  modified_base (581603)..(581603): a, c, g or t
  modified_base (581855)..(581868): a, c, g or t
  modified_base (585499)..(585503): a, c, g or t
  modified_base (585878)..(585887): a, c, g or t
  modified_base (586167)..(586167): a, c, g or t
  modified_base (586486)..(586489): a, c, g or t
  modified_base (589939)..(589939): a, c, g or t
  modified_base (591009)..(591009): a, c, g or t
  modified_base (591729)..(591729): a, c, g or t
  modified_base (591731)..(591743): a, c, g or t
  modified_base (591789)..(591792): a, c, g or t
  modified_base (592670)..(592670): a, c, g or t
  modified_base (592987)..(592987): a, c, g or t
  modified_base (594140)..(594140): a, c, g or t
  modified_base (594144)..(594148): a, c, g or t
  modified_base (594151)..(594152): a, c, g or t
  modified_base (594774)..(594774): a, c, g or t
  modified_base (595054)..(595054): a, c, g or t
  modified_base (595166)..(595166): a, c, g or t
  modified_base (595218)..(595218): a, c, g or t
  modified_base (595254)..(595254): a, c, g or t
  modified_base (595324)..(595324): a, c, g or t
  modified_base (595334)..(595334): a, c, g or t
  modified_base (595975)..(595978): a, c, g or t
  modified_base (598140)..(598141): a, c, g or t
  modified_base (598145)..(598153): a, c, g or t
  modified_base (602334)..(602334): a, c, g or t
  modified_base (604066)..(604067): a, c, g or t
  modified_base (606087)..(606088): a, c, g or t
  modified_base (606220)..(606225): a, c, g or t
  modified_base (607128)..(607128): a, c, g or t
  modified_base (609359)..(609359): a, c, g or t
  modified_base (611867)..(611867): a, c, g or t
  modified_base (615627)..(615642): a, c, g or t
  modified_base (615896)..(615897): a, c, g or t
  modified_base (616312)..(616312): a, c, g or t
  modified_base (618194)..(618194): a, c, g or t
  modified_base (618197)..(618198): a, c, g or t
  modified_base (618852)..(618855): a, c, g or t
  modified_base (619407)..(619407): a, c, g or t
  modified_base (620050)..(620050): a, c, g or t
  modified_base (620802)..(620803): a, c, g or t
  modified_base (622970)..(622974): a, c, g or t
  modified_base (624391)..(624391): a, c, g or t
  modified_base (625206)..(625209): a, c, g or t
  modified_base (625243)..(625246): a, c, g or t
  modified_base (625624)..(625627): a, c, g or t
  modified_base (627569)..(627569): a, c, g or t
  modified_base (628728)..(628728): a, c, g or t
  modified_base (628893)..(628893): a, c, g or t
  modified_base (628904)..(628904): a, c, g or t
  modified_base (630430)..(630433): a, c, g or t
  modified_base (630641)..(630641): a, c, g or t
  modified_base (632319)..(632319): a, c, g or t
  modified_base (632635)..(632635): a, c, g or t
  modified_base (634307)..(634307): a, c, g or t
  modified_base (634905)..(634905): a, c, g or t
  modified_base (634993)..(634993): a, c, g or t
  modified_base (636256)..(636259): a, c, g or t
  modified_base (636263)..(636264): a, c, g or t
  modified_base (636570)..(636580): a, c, g or t
  modified_base (637768)..(637768): a, c, g or t
  modified_base (637770)..(637777): a, c, g or t
  modified_base (638422)..(638425): a, c, g or t
  modified_base (639556)..(639569): a, c, g or t
  modified_base (641807)..(641807): a, c, g or t
  modified_base (641810)..(641811): a, c, g or t
  modified_base (644698)..(644698): a, c, g or t
  modified_base (648241)..(648241): a, c, g or t
  modified_base (648323)..(648323): a, c, g or t
  modified_base (648358)..(648358): a, c, g or t
  modified_base (649192)..(649192): a, c, g or t
  modified_base (649276)..(649276): a, c, g or t
  modified_base (650148)..(650151): a, c, g or t
  modified_base (650810)..(650813): a, c, g or t
  modified_base (650815)..(650816): a, c, g or t
  modified_base (651982)..(651995): a, c, g or t
  modified_base (652939)..(652939): a, c, g or t
  modified_base (653523)..(653538): a, c, g or t
  modified_base (654889)..(654889): a, c, g or t
  modified_base (654895)..(654898): a, c, g or t
  modified_base (655053)..(655054): a, c, g or t
  modified_base (655058)..(655066): a, c, g or t
  modified_base (655293)..(655297): a, c, g or t
  modified_base (655963)..(655963): a, c, g or t
  modified_base (656001)..(656012): a, c, g or t
  modified_base (656274)..(656277): a, c, g or t
  modified_base (657455)..(657458): a, c, g or t
  modified_base (657644)..(657646): a, c, g or t
  modified_base (657672)..(657673): a, c, g or t
  modified_base (658009)..(658009): a, c, g or t
  modified_base (658954)..(658955): a, c, g or t
  modified_base (661722)..(661722): a, c, g or t
  modified_base (662186)..(662188): a, c, g or t
  modified_base (662382)..(662382): a, c, g or t
  modified_base (664782)..(664782): a, c, g or t
  modified_base (664787)..(664798): a, c, g or t
  modified_base (665007)..(665007): a, c, g or t
  modified_base (665605)..(665605): a, c, g or t
  modified_base (665609)..(665610): a, c, g or t
  modified_base (665613)..(665618): a, c, g or t
  modified_base (666834)..(666835): a, c, g or t
  modified_base (667553)..(667554): a, c, g or t
  modified_base (668391)..(668394): a, c, g or t
  modified_base (669377)..(669378): a, c, g or t
  modified_base (669393)..(669394): a, c, g or t
  modified_base (669397)..(669397): a, c, g or t
  modified_base (669406)..(669406): a, c, g or t
  modified_base (669408)..(669446): a, c, g or t
  modified_base (670969)..(670969): a, c, g or t
  modified_base (671334)..(671338): a, c, g or t
  modified_base (672185)..(672185): a, c, g or t
  modified_base (673146)..(673150): a, c, g or t
  modified_base (676592)..(676592): a, c, g or t
  modified_base (678104)..(678104): a, c, g or t
  modified_base (685061)..(685061): a, c, g or t
  modified_base (687870)..(687870): a, c, g or t
  modified_base (688026)..(688026): a, c, g or t
  modified_base (688992)..(688992): a, c, g or t
  modified_base (689540)..(689541): a, c, g or t
  modified_base (692530)..(692530): a, c, g or t
  modified_base (692916)..(692916): a, c, g or t
  modified_base (693132)..(693132): a, c, g or t
  modified_base (695933)..(695933): a, c, g or t
  modified_base (696026)..(696031): a, c, g or t
  modified_base (696868)..(696870): a, c, g or t
  modified_base (698237)..(698237): a, c, g or t
  modified_base (698861)..(698862): a, c, g or t
  modified_base (698865)..(698865): a, c, g or t
  modified_base (698868)..(698869): a, c, g or t
  modified_base (703581)..(703581): a, c, g or t
  modified_base (703633)..(703633): a, c, g or t
  modified_base (703641)..(703641): a, c, g or t
  modified_base (704656)..(704656): a, c, g or t
  modified_base (704988)..(704988): a, c, g or t
  modified_base (706436)..(706436): a, c, g or t
  modified_base (706919)..(706919): a, c, g or t
  modified_base (707074)..(707074): a, c, g or t
  modified_base (707216)..(707216): a, c, g or t
  modified_base (707664)..(707664): a, c, g or t
  modified_base (712776)..(712776): a, c, g or t
  modified_base (714460)..(714464): a, c, g or t
  modified_base (714466)..(714469): a, c, g or t
  modified_base (716160)..(716160): a, c, g or t
  modified_base (716331)..(716331): a, c, g or t
  modified_base (717687)..(717687): a, c, g or t
  modified_base (720996)..(720996): a, c, g or t
  modified_base (721561)..(721565): a, c, g or t
  modified_base (724948)..(724948): a, c, g or t
  modified_base (725529)..(725529): a, c, g or t
  modified_base (727886)..(727886): a, c, g or t
  modified_base (729811)..(729811): a, c, g or t
  modified_base (729953)..(729953): a, c, g or t
  modified_base (732245)..(732248): a, c, g or t
  modified_base (733889)..(733889): a, c, g or t
  modified_base (734891)..(734891): a, c, g or t
  modified_base (734893)..(734897): a, c, g or t
  modified_base (736497)..(736500): a, c, g or t
  modified_base (737741)..(737741): a, c, g or t
  modified_base (738483)..(738483): a, c, g or t
  modified_base (738493)..(738493): a, c, g or t
  modified_base (738645)..(738645): a, c, g or t
  modified_base (738649)..(738649): a, c, g or t
  modified_base (739403)..(739403): a, c, g or t
  modified_base (739679)..(739679): a, c, g or t
  modified_base (739781)..(739781): a, c, g or t
  modified_base (741596)..(741613): a, c, g or t
  modified_base (744800)..(744800): a, c, g or t
  modified_base (747734)..(747734): a, c, g or t
  modified_base (748099)..(748099): a, c, g or t
  modified_base (748556)..(748556): a, c, g or t
  modified_base (748786)..(748790): a, c, g or t
  modified_base (749604)..(749604): a, c, g or t
  modified_base (750083)..(750083): a, c, g or t
  modified_base (753691)..(753691): a, c, g or t
  modified_base (754752)..(754753): a, c, g or t
  modified_base (756485)..(756485): a, c, g or t
  modified_base (756509)..(756509): a, c, g or t
  modified_base (758574)..(758574): a, c, g or t
  modified_base (759574)..(759574): a, c, g or t
  modified_base (759635)..(759635): a, c, g or t
  modified_base (759745)..(759745): a, c, g or t
  modified_base (762972)..(762972): a, c, g or t
  modified_base (765086)..(765086): a, c, g or t
  modified_base (765946)..(765946): a, c, g or t
  modified_base (766395)..(766395): a, c, g or t
  modified_base (766496)..(766496): a, c, g or t
  modified_base (768974)..(768977): a, c, g or t
  modified_base (772823)..(772823): a, c, g or t
  modified_base (774934)..(774934): a, c, g or t
  modified_base (775088)..(775088): a, c, g or t
  modified_base (775370)..(775370): a, c, g or t
  modified_base (775413)..(775417): a, c, g or t
  modified_base (775421)..(775421): a, c, g or t
  modified_base (775450)..(775456): a, c, g or t
  modified_base (775565)..(775566): a, c, g or t
  modified_base (776410)..(776410): a, c, g or t
  modified_base (778006)..(778006): a, c, g or t
  modified_base (778357)..(778360): a, c, g or t
  modified_base (781879)..(781879): a, c, g or t
  modified_base (782104)..(782104): a, c, g or t
  modified_base (782655)..(782655): a, c, g or t
  modified_base (783775)..(783775): a, c, g or t
  modified_base (783964)..(783964): a, c, g or t
  modified_base (784224)..(784224): a, c, g or t
  modified_base (786859)..(786867): a, c, g or t
  modified_base (789515)..(789518): a, c, g or t
  modified_base (789986)..(789989): a, c, g or t
  modified_base (792286)..(792291): a, c, g or t
  modified_base (793619)..(793619): a, c, g or t
  modified_base (796438)..(796438): a, c, g or t
  modified_base (796795)..(796795): a, c, g or t
  modified_base (797231)..(797234): a, c, g or t
  modified_base (798647)..(798650): a, c, g or t
  modified_base (798933)..(798933): a, c, g or t
  modified_base (800264)..(800264): a, c, g or t
  modified_base (803326)..(803329): a, c, g or t
  modified_base (805000)..(805000): a, c, g or t
  modified_base (805165)..(805165): a, c, g or t
  modified_base (806646)..(806647): a, c, g or t
  modified_base (806925)..(806926): a, c, g or t
  modified_base (807398)..(807398): a, c, g or t
  modified_base (808012)..(808012): a, c, g or t
  modified_base (808457)..(808457): a, c, g or t
  modified_base (808743)..(808743): a, c, g or t
  modified_base (809143)..(809143): a, c, g or t
  modified_base (809317)..(809318): a, c, g or t
  modified_base (809324)..(809325): a, c, g or t
  modified_base (810065)..(810066): a, c, g or t
  modified_base (810263)..(810269): a, c, g or t
  modified_base (812205)..(812205): a, c, g or t
  modified_base (812207)..(812211): a, c, g or t
  modified_base (812626)..(812626): a, c, g or t
  modified_base (815916)..(815916): a, c, g or t
  modified_base (816475)..(816485): a, c, g or t
  modified_base (816783)..(816783): a, c, g or t
  modified_base (816905)..(816905): a, c, g or t
  modified_base (817309)..(817309): a, c, g or t
  modified_base (818866)..(818866): a, c, g or t
  modified_base (819806)..(819806): a, c, g or t
  modified_base (821727)..(821727): a, c, g or t
  modified_base (824406)..(824412): a, c, g or t
  modified_base (825699)..(825699): a, c, g or t
  modified_base (828358)..(828358): a, c, g or t
  modified_base (828360)..(828363): a, c, g or t
  modified_base (828589)..(828589): a, c, g or t
  modified_base (828620)..(828624): a, c, g or t
  modified_base (829872)..(829872): a, c, g or t
  modified_base (832150)..(832155): a, c, g or t
  modified_base (834164)..(834164): a, c, g or t
  modified_base (834471)..(834471): a, c, g or t
  modified_base (834488)..(834488): a, c, g or t
  modified_base (834768)..(834769): a, c, g or t
  modified_base (835920)..(835930): a, c, g or t
  modified_base (836912)..(836912): a, c, g or t
  modified_base (837829)..(837830): a, c, g or t
  modified_base (837832)..(837834): a, c, g or t
  modified_base (841466)..(841468): a, c, g or t
  modified_base (841471)..(841472): a, c, g or t
  modified_base (842227)..(842227): a, c, g or t
  modified_base (842483)..(842483): a, c, g or t
  modified_base (843022)..(843023): a, c, g or t
  modified_base (843025)..(843040): a, c, g or t
  modified_base (843501)..(843501): a, c, g or t
  modified_base (843650)..(843653): a, c, g or t
  modified_base (843657)..(843657): a, c, g or t
  modified_base (846672)..(846675): a, c, g or t
  modified_base (850455)..(850458): a, c, g or t
  modified_base (850856)..(850856): a, c, g or t
  modified_base (851412)..(851421): a, c, g or t
  modified_base (852163)..(852166): a, c, g or t
  modified_base (853229)..(853232): a, c, g or t
  modified_base (861080)..(861080): a, c, g or t
  modified_base (863145)..(863145): a, c, g or t
  modified_base (863808)..(863811): a, c, g or t
  modified_base (863975)..(863976): a, c, g or t
  modified_base (863979)..(864005): a, c, g or t
  modified_base (864110)..(864121): a, c, g or t
  modified_base (864124)..(864124): a, c, g or t
  modified_base (864190)..(864212): a, c, g or t
  modified_base (868882)..(868882): a, c, g or t
  modified_base (868885)..(868885): a, c, g or t
  modified_base (869349)..(869349): a, c, g or t
  modified_base (871041)..(871041): a, c, g or t
  modified_base (872598)..(872598): a, c, g or t
  modified_base (872619)..(872619): a, c, g or t
  modified_base (872849)..(872849): a, c, g or t
  modified_base (873366)..(873368): a, c, g or t
  modified_base (873567)..(873568): a, c, g or t
  modified_base (873571)..(873574): a, c, g or t
  modified_base (873753)..(873753): a, c, g or t
  modified_base (874317)..(874323): a, c, g or t
  modified_base (874327)..(874327): a, c, g or t
  modified_base (874334)..(874335): a, c, g or t
  modified_base (874893)..(874893): a, c, g or t
  modified_base (877050)..(877050): a, c, g or t
  modified_base (881463)..(881463): a, c, g or t
  modified_base (884510)..(884515): a, c, g or t
  modified_base (885137)..(885137): a, c, g or t
  modified_base (886228)..(886231): a, c, g or t
  modified_base (886444)..(886451): a, c, g or t
  modified_base (888634)..(888634): a, c, g or t
  modified_base (889772)..(889772): a, c, g or t
  modified_base (890749)..(890752): a, c, g or t
  modified_base (890981)..(890981): a, c, g or t
  modified_base (891705)..(891706): a, c, g or t
  modified_base (891734)..(891740): a, c, g or t
  modified_base (891742)..(891743): a, c, g or t
  modified_base (891797)..(891797): a, c, g or t
  modified_base (892712)..(892712): a, c, g or t
  modified_base (894384)..(894384): a, c, g or t
  modified_base (894386)..(894397): a, c, g or t
  modified_base (894604)..(894604): a, c, g or t
  modified_base (894700)..(894701): a, c, g or t
  modified_base (894798)..(894799): a, c, g or t
  modified_base (894802)..(894807): a, c, g or t
  modified_base (895829)..(895830): a, c, g or t
  modified_base (895851)..(895854): a, c, g or t
  modified_base (895924)..(895927): a, c, g or t
  modified_base (895946)..(895950): a, c, g or t
  modified_base (896038)..(896038): a, c, g or t
  modified_base (896655)..(896659): a, c, g or t
  modified_base (896683)..(896689): a, c, g or t
  modified_base (896692)..(896692): a, c, g or t
  modified_base (897752)..(897755): a, c, g or t
  modified_base (897826)..(897837): a, c, g or t
  modified_base (897897)..(897897): a, c, g or t
  modified_base (898829)..(898832): a, c, g or t
  modified_base (900978)..(900978): a, c, g or t
  modified_base (901496)..(901496): a, c, g or t
  modified_base (901769)..(901769): a, c, g or t
  modified_base (902140)..(902140): a, c, g or t
  modified_base (902233)..(902233): a, c, g or t
  modified_base (907744)..(907744): a, c, g or t
  modified_base (907780)..(907780): a, c, g or t
  modified_base (909640)..(909640): a, c, g or t
  modified_base (915001)..(915001): a, c, g or t
  modified_base (915169)..(915169): a, c, g or t
  modified_base (915482)..(915482): a, c, g or t
  modified_base (915516)..(915516): a, c, g or t
  modified_base (915534)..(915534): a, c, g or t
  modified_base (915549)..(915549): a, c, g or t
  modified_base (915551)..(915551): a, c, g or t
  modified_base (915582)..(915582): a, c, g or t
  modified_base (915595)..(915595): a, c, g or t
  modified_base (915710)..(915710): a, c, g or t
  modified_base (915867)..(915867): a, c, g or t
  modified_base (915873)..(915873): a, c, g or t
  modified_base (915900)..(915900): a, c, g or t
  modified_base (915933)..(915933): a, c, g or t
  modified_base (915972)..(915972): a, c, g or t
  modified_base (915999)..(915999): a, c, g or t
  modified_base (916139)..(916139): a, c, g or t
  modified_base (916146)..(916146): a, c, g or t
  modified_base (916178)..(916178): a, c, g or t
  modified_base (916273)..(916273): a, c, g or t
  modified_base (916310)..(916314): a, c, g or t
  modified_base (916442)..(916442): a, c, g or t
  modified_base (916559)..(916559): a, c, g or t
  modified_base (916718)..(916718): a, c, g or t
  modified_base (917004)..(917008): a, c, g or t
  modified_base (917270)..(917270): a, c, g or t
  modified_base (917328)..(917328): a, c, g or t
  modified_base (917364)..(917364): a, c, g or t
  modified_base (917433)..(917433): a, c, g or t
  modified_base (917477)..(917477): a, c, g or t
  modified_base (917881)..(917881): a, c, g or t
  modified_base (918103)..(918116): a, c, g or t
  modified_base (918131)..(918131): a, c, g or t
  modified_base (918325)..(918325): a, c, g or t
  modified_base (918370)..(918370): a, c, g or t
  modified_base (918468)..(918468): a, c, g or t
  modified_base (918639)..(918639): a, c, g or t
  modified_base (918714)..(918714): a, c, g or t
  modified_base (918894)..(918894): a, c, g or t
  modified_base (919608)..(919608): a, c, g or t
  modified_base (919686)..(919686): a, c, g or t
  modified_base (919842)..(919842): a, c, g or t
  modified_base (919893)..(919893): a, c, g or t
  modified_base (919926)..(919926): a, c, g or t
  modified_base (919935)..(919935): a, c, g or t
  modified_base (919954)..(919954): a, c, g or t
  modified_base (919968)..(919968): a, c, g or t
  modified_base (920001)..(920001): a, c, g or t
  modified_base (920157)..(920157): a, c, g or t
  modified_base (920256)..(920256): a, c, g or t
  modified_base (920418)..(920418): a, c, g or t
  modified_base (920466)..(920466): a, c, g or t
  modified_base (920508)..(920508): a, c, g or t
  modified_base (920544)..(920544): a, c, g or t
  modified_base (920639)..(920639): a, c, g or t
  modified_base (920676)..(920676): a, c, g or t
  modified_base (920691)..(920691): a, c, g or t
  modified_base (920757)..(920757): a, c, g or t
  modified_base (920883)..(920883): a, c, g or t
  modified_base (920901)..(920901): a, c, g or t
  modified_base (920938)..(920957): a, c, g or t
  modified_base (920968)..(920968): a, c, g or t
  modified_base (920998)..(920998): a, c, g or t
  modified_base (921025)..(921025): a, c, g or t
  modified_base (921036)..(921036): a, c, g or t
  modified_base (921055)..(921055): a, c, g or t
  modified_base (921076)..(921076): a, c, g or t
  modified_base (921079)..(921079): a, c, g or t
  modified_base (921231)..(921231): a, c, g or t
  modified_base (921244)..(921244): a, c, g or t
  modified_base (921249)..(921249): a, c, g or t
  modified_base (921280)..(921280): a, c, g or t
  modified_base (921295)..(921295): a, c, g or t
  modified_base (921313)..(921313): a, c, g or t
  modified_base (921332)..(921332): a, c, g or t
  modified_base (921358)..(921358): a, c, g or t
  modified_base (921370)..(921374): a, c, g or t
  modified_base (921409)..(921409): a, c, g or t
  modified_base (921460)..(921460): a, c, g or t
  modified_base (921515)..(921515): a, c, g or t
  modified_base (921529)..(921529): a, c, g or t
  modified_base (921569)..(921572): a, c, g or t
  modified_base (921574)..(921574): a, c, g or t
  modified_base (921590)..(921590): a, c, g or t
  modified_base (921630)..(921630): a, c, g or t
  modified_base (921734)..(921734): a, c, g or t
  modified_base (921759)..(921759): a, c, g or t
  modified_base (921777)..(921777): a, c, g or t
  modified_base (921798)..(921798): a, c, g or t
  modified_base (921804)..(921804): a, c, g or t
  modified_base (921846)..(921846): a, c, g or t
  modified_base (921865)..(921865): a, c, g or t
  modified_base (921888)..(921888): a, c, g or t
  modified_base (921945)..(921945): a, c, g or t
  modified_base (921951)..(921951): a, c, g or t
  modified_base (922020)..(922020): a, c, g or t
  modified_base (922029)..(922029): a, c, g or t
  modified_base (922074)..(922074): a, c, g or t
  modified_base (922101)..(922101): a, c, g or t
  modified_base (922143)..(922143): a, c, g or t
  modified_base (922150)..(922150): a, c, g or t
  modified_base (922161)..(922161): a, c, g or t
  modified_base (922211)..(922211): a, c, g or t
  modified_base (922478)..(922482): a, c, g or t
  modified_base (922855)..(922855): a, c, g or t
  modified_base (922878)..(922878): a, c, g or t
  modified_base (922893)..(922893): a, c, g or t
  modified_base (922911)..(922911): a, c, g or t
  modified_base (922944)..(922944): a, c, g or t
  modified_base (923053)..(923053): a, c, g or t
  modified_base (923065)..(923065): a, c, g or t
  modified_base (923086)..(923086): a, c, g or t
  modified_base (923103)..(923103): a, c, g or t
  modified_base (923116)..(923116): a, c, g or t
  modified_base (923399)..(923399): a, c, g or t
  modified_base (923865)..(923865): a, c, g or t
  modified_base (923959)..(923959): a, c, g or t
  modified_base (924475)..(924478): a, c, g or t
  modified_base (925758)..(925758): a, c, g or t
  modified_base (925813)..(925822): a, c, g or t
  modified_base (925883)..(925884): a, c, g or t
  modified_base (927996)..(927996): a, c, g or t
  modified_base (928525)..(928525): a, c, g or t
  modified_base (929150)..(929152): a, c, g or t
  modified_base (929259)..(929259): a, c, g or t
  modified_base (929381)..(929381): a, c, g or t
  modified_base (930866)..(930866): a, c, g or t
  modified_base (932591)..(932591): a, c, g or t
  modified_base (933298)..(933298): a, c, g or t
  modified_base (933398)..(933398): a, c, g or t
  modified_base (934127)..(934131): a, c, g or t
  modified_base (934882)..(934882): a, c, g or t
  modified_base (935711)..(935711): a, c, g or t
  modified_base (936816)..(936816): a, c, g or t
  modified_base (937188)..(937188): a, c, g or t
  modified_base (937828)..(937828): a, c, g or t
  modified_base (937831)..(937837): a, c, g or t
  modified_base (938075)..(938075): a, c, g or t
  modified_base (939309)..(939309): a, c, g or t
  modified_base (939576)..(939576): a, c, g or t
  modified_base (939789)..(939790): a, c, g or t
  modified_base (941899)..(941915): a, c, g or t
  modified_base (942548)..(942548): a, c, g or t
  modified_base (942867)..(942867): a, c, g or t
  modified_base (945049)..(945049): a, c, g or t
  modified_base (946500)..(946500): a, c, g or t
  modified_base (947875)..(947875): a, c, g or t
  modified_base (949557)..(949557): a, c, g or t
  modified_base (950797)..(950797): a, c, g or t
  modified_base (951058)..(951058): a, c, g or t
  modified_base (954776)..(954776): a, c, g or t
  modified_base (955727)..(955727): a, c, g or t
  modified_base (956314)..(956314): a, c, g or t
  modified_base (956697)..(956700): a, c, g or t
  modified_base (957261)..(957261): a, c, g or t
  modified_base (958518)..(958522): a, c, g or t
  modified_base (959483)..(959486): a, c, g or t
  modified_base (960426)..(960431): a, c, g or t
  modified_base (960450)..(960450): a, c, g or t
  modified_base (960728)..(960731): a, c, g or t
  modified_base (960975)..(960978): a, c, g or t
  modified_base (961938)..(961938): a, c, g or t
  modified_base (962224)..(962227): a, c, g or t
  modified_base (963321)..(963321): a, c, g or t
  modified_base (965180)..(965181): a, c, g or t
  modified_base (965403)..(965403): a, c, g or t
  modified_base (966555)..(966555): a, c, g or t
  modified_base (969219)..(969219): a, c, g or t
  modified_base (969470)..(969470): a, c, g or t
  modified_base (970344)..(970349): a, c, g or t
  modified_base (973378)..(973378): a, c, g or t
  modified_base (974137)..(974137): a, c, g or t
  modified_base (975586)..(975586): a, c, g or t
  modified_base (976157)..(976157): a, c, g or t
  modified_base (977112)..(977112): a, c, g or t
  modified_base (978930)..(978930): a, c, g or t
  modified_base (978939)..(978939): a, c, g or t
  modified_base (979913)..(979914): a, c, g or t
  modified_base (982178)..(982181): a, c, g or t
  modified_base (983609)..(983612): a, c, g or t
  modified_base (986099)..(986099): a, c, g or t
  modified_base (986904)..(986904): a, c, g or t
  modified_base (987285)..(987285): a, c, g or t
  modified_base (988488)..(988489): a, c, g or t
  modified_base (988491)..(988499): a, c, g or t
  modified_base (988503)..(988503): a, c, g or t
  modified_base (989005)..(989005): a, c, g or t
  modified_base (991164)..(991164): a, c, g or t
  modified_base (995958)..(995958): a, c, g or t
  modified_base (996009)..(996009): a, c, g or t
  modified_base (996437)..(996440): a, c, g or t
  modified_base (999302)..(999302): a, c, g or t
  modified_base (1003420)..(1003429): a, c, g or t
  modified_base (1003739)..(1003739): a, c, g or t
  modified_base (1006777)..(1006777): a, c, g or t
  modified_base (1009336)..(1009342): a, c, g or t
  modified_base (1010551)..(1010556): a, c, g or t
  modified_base (1010823)..(1010823): a, c, g or t
  modified_base (1012017)..(1012017): a, c, g or t
  modified_base (1016473)..(1016473): a, c, g or t
  modified_base (1016539)..(1016539): a, c, g or t
  modified_base (1016737)..(1016737): a, c, g or t
  modified_base (1016968)..(1016968): a, c, g or t
  modified_base (1017076)..(1017076): a, c, g or t
  modified_base (1017122)..(1017122): a, c, g or t
  modified_base (1017124)..(1017124): a, c, g or t
  modified_base (1017130)..(1017130): a, c, g or t
  modified_base (1022144)..(1022147): a, c, g or t
  modified_base (1025444)..(1025444): a, c, g or t
  modified_base (1026003)..(1026008): a, c, g or t
  modified_base (1031209)..(1031209): a, c, g or t
  modified_base (1031345)..(1031345): a, c, g or t
  modified_base (1031446)..(1031446): a, c, g or t
  modified_base (1032177)..(1032178): a, c, g or t
  modified_base (1032451)..(1032459): a, c, g or t
  modified_base (1033020)..(1033021): a, c, g or t
  modified_base (1033070)..(1033074): a, c, g or t
  modified_base (1033581)..(1033586): a, c, g or t
  modified_base (1034691)..(1034691): a, c, g or t
  modified_base (1035565)..(1035565): a, c, g or t
  modified_base (1036266)..(1036266): a, c, g or t
  modified_base (1036577)..(1036577): a, c, g or t
  modified_base (1037803)..(1037806): a, c, g or t
  modified_base (1038992)..(1038992): a, c, g or t
  modified_base (1040300)..(1040300): a, c, g or t
  modified_base (1040814)..(1040814): a, c, g or t
  modified_base (1044952)..(1044953): a, c, g or t
  modified_base (1044960)..(1044961): a, c, g or t
  modified_base (1047829)..(1047829): a, c, g or t
  modified_base (1050452)..(1050455): a, c, g or t
  modified_base (1053904)..(1053909): a, c, g or t
  modified_base (1053911)..(1053911): a, c, g or t
  modified_base (1055611)..(1055611): a, c, g or t
  modified_base (1056878)..(1056878): a, c, g or t
  modified_base (1060098)..(1060103): a, c, g or t
  modified_base (1060445)..(1060445): a, c, g or t
  modified_base (1062288)..(1062288): a, c, g or t
  modified_base (1063809)..(1063809): a, c, g or t
  modified_base (1064535)..(1064535): a, c, g or t
  modified_base (1066852)..(1066852): a, c, g or t
  modified_base (1067949)..(1067949): a, c, g or t
  modified_base (1068510)..(1068510): a, c, g or t
  modified_base (1068584)..(1068584): a, c, g or t
  modified_base (1068939)..(1068939): a, c, g or t
  modified_base (1069378)..(1069378): a, c, g or t
  modified_base (1071920)..(1071920): a, c, g or t
  modified_base (1075063)..(1075063): a, c, g or t
  modified_base (1080091)..(1080091): a, c, g or t
  modified_base (1080093)..(1080096): a, c, g or t
  modified_base (1083035)..(1083084): a, c, g or t
  modified_base (1084929)..(1084929): a, c, g or t
  modified_base (1085653)..(1085653): a, c, g or t
  modified_base (1086353)..(1086357): a, c, g or t
  modified_base (1089525)..(1089525): a, c, g or t
  modified_base (1090976)..(1090976): a, c, g or t
  modified_base (1093558)..(1093558): a, c, g or t
  modified_base (1097544)..(1097547): a, c, g or t
  modified_base (1102472)..(1102472): a, c, g or t
  modified_base (1103016)..(1103016): a, c, g or t
  modified_base (1103200)..(1103200): a, c, g or t
  modified_base (1103543)..(1103543): a, c, g or t
  modified_base (1105460)..(1105460): a, c, g or t
  modified_base (1105999)..(1106000): a, c, g or t
  modified_base (1106004)..(1106004): a, c, g or t
  modified_base (1107794)..(1107794): a, c, g or t
  modified_base (1110654)..(1110654): a, c, g or t
  modified_base (1111576)..(1111576): a, c, g or t
  modified_base (1114665)..(1114665): a, c, g or t
  modified_base (1117446)..(1117446): a, c, g or t
  modified_base (1120075)..(1120075): a, c, g or t
  modified_base (1121170)..(1121170): a, c, g or t
  modified_base (1122383)..(1122383): a, c, g or t
  modified_base (1123377)..(1123377): a, c, g or t
  modified_base (1123396)..(1123396): a, c, g or t
  modified_base (1124474)..(1124474): a, c, g or t
  modified_base (1124561)..(1124561): a, c, g or t
  modified_base (1124714)..(1124714): a, c, g or t
  modified_base (1125765)..(1125765): a, c, g or t
  modified_base (1125940)..(1125941): a, c, g or t
  modified_base (1126001)..(1126013): a, c, g or t
  modified_base (1126016)..(1126016): a, c, g or t
  modified_base (1127069)..(1127069): a, c, g or t
  modified_base (1127072)..(1127072): a, c, g or t
  modified_base (1131327)..(1131327): a, c, g or t
  modified_base (1132190)..(1132190): a, c, g or t
  modified_base (1133092)..(1133092): a, c, g or t
  modified_base (1134903)..(1134906): a, c, g or t
  modified_base (1137457)..(1137457): a, c, g or t
  modified_base (1138730)..(1138730): a, c, g or t
  modified_base (1139343)..(1139343): a, c, g or t
  modified_base (1139406)..(1139406): a, c, g or t
  modified_base (1144183)..(1144187): a, c, g or t
  modified_base (1144189)..(1144189): a, c, g or t
  modified_base (1148610)..(1148610): a, c, g or t
  modified_base (1148732)..(1148732): a, c, g or t
  modified_base (1150787)..(1150787): a, c, g or t
  modified_base (1151076)..(1151076): a, c, g or t
  modified_base (1155711)..(1155711): a, c, g or t
  modified_base (1156372)..(1156380): a, c, g or t
  modified_base (1156383)..(1156386): a, c, g or t
  modified_base (1156633)..(1156633): a, c, g or t
  modified_base (1159489)..(1159489): a, c, g or t
  modified_base (1163078)..(1163078): a, c, g or t
  modified_base (1165021)..(1165021): a, c, g or t
  modified_base (1173496)..(1173496): a, c, g or t
  modified_base (1174240)..(1174240): a, c, g or t
  modified_base (1175553)..(1175553): a, c, g or t
  modified_base (1178760)..(1178761): a, c, g or t
  modified_base (1178763)..(1178774): a, c, g or t
  modified_base (1179177)..(1179177): a, c, g or t
  modified_base (1179189)..(1179189): a, c, g or t
  modified_base (1179246)..(1179246): a, c, g or t
  modified_base (1180763)..(1180763): a, c, g or t
  modified_base (1182048)..(1182051): a, c, g or t
  modified_base (1186774)..(1186774): a, c, g or t
  modified_base (1186912)..(1186912): a, c, g or t
  modified_base (1187369)..(1187369): a, c, g or t
  modified_base (1187450)..(1187450): a, c, g or t
  modified_base (1189068)..(1189068): a, c, g or t
  modified_base (1189081)..(1189081): a, c, g or t
  modified_base (1190239)..(1190239): a, c, g or t
  modified_base (1190253)..(1190253): a, c, g or t
  modified_base (1191509)..(1191509): a, c, g or t
  modified_base (1191578)..(1191580): a, c, g or t
  modified_base (1191649)..(1191649): a, c, g or t
  modified_base (1191869)..(1191869): a, c, g or t
  modified_base (1192426)..(1192427): a, c, g or t
  modified_base (1192777)..(1192777): a, c, g or t
  modified_base (1193249)..(1193249): a, c, g or t
  modified_base (1194491)..(1194491): a, c, g or t
  modified_base (1194740)..(1194744): a, c, g or t
  modified_base (1194919)..(1194919): a, c, g or t
  modified_base (1195015)..(1195015): a, c, g or t
  modified_base (1195355)..(1195364): a, c, g or t
  modified_base (1195822)..(1195823): a, c, g or t
  modified_base (1196885)..(1196885): a, c, g or t
  modified_base (1197187)..(1197187): a, c, g or t
  modified_base (1197593)..(1197599): a, c, g or t
  modified_base (1198717)..(1198720): a, c, g or t
  modified_base (1198722)..(1198725): a, c, g or t
  modified_base (1200623)..(1200624): a, c, g or t
  modified_base (1201300)..(1201300): a, c, g or t
  modified_base (1201514)..(1201514): a, c, g or t
  modified_base (1201943)..(1201943): a, c, g or t
  modified_base (1204880)..(1204883): a, c, g or t
  modified_base (1205697)..(1205697): a, c, g or t
  modified_base (1209601)..(1209603): a, c, g or t
  modified_base (1212677)..(1212688): a, c, g or t
  modified_base (1214777)..(1214777): a, c, g or t
  modified_base (1217715)..(1217715): a, c, g or t
  modified_base (1217717)..(1217718): a, c, g or t
  modified_base (1220813)..(1220813): a, c, g or t
  modified_base (1221486)..(1221486): a, c, g or t
  modified_base (1221498)..(1221498): a, c, g or t
  modified_base (1222736)..(1222736): a, c, g or t
  modified_base (1223145)..(1223153): a, c, g or t
  modified_base (1223332)..(1223333): a, c, g or t
  modified_base (1225505)..(1225508): a, c, g or t
  modified_base (1225751)..(1225758): a, c, g or t
  modified_base (1225994)..(1225994): a, c, g or t
  modified_base (1226822)..(1226822): a, c, g or t
  modified_base (1227354)..(1227354): a, c, g or t
  modified_base (1230479)..(1230479): a, c, g or t
  modified_base (1232941)..(1232941): a, c, g or t
  modified_base (1234685)..(1234685): a, c, g or t
  modified_base (1235401)..(1235401): a, c, g or t
  modified_base (1235544)..(1235544): a, c, g or t
  modified_base (1235725)..(1235725): a, c, g or t
  modified_base (1235956)..(1235956): a, c, g or t
  modified_base (1239293)..(1239293): a, c, g or t
  modified_base (1240389)..(1240392): a, c, g or t
  modified_base (1241637)..(1241641): a, c, g or t
  modified_base (1244943)..(1244943): a, c, g or t
  modified_base (1244946)..(1244946): a, c, g or t
  modified_base (1245437)..(1245440): a, c, g or t
  modified_base (1248174)..(1248174): a, c, g or t
  modified_base (1248927)..(1248933): a, c, g or t
  modified_base (1249024)..(1249024): a, c, g or t
  modified_base (1251434)..(1251440): a, c, g or t
  modified_base (1252691)..(1252700): a, c, g or t
  modified_base (1252710)..(1252710): a, c, g or t
  modified_base (1253386)..(1253386): a, c, g or t
  modified_base (1253699)..(1253706): a, c, g or t
  modified_base (1253766)..(1253767): a, c, g or t
  modified_base (1254559)..(1254559): a, c, g or t
  modified_base (1256167)..(1256170): a, c, g or t
  modified_base (1257047)..(1257086): a, c, g or t
  modified_base (1259262)..(1259262): a, c, g or t
  modified_base (1259568)..(1259568): a, c, g or t
  modified_base (1260189)..(1260189): a, c, g or t
  modified_base (1261350)..(1261368): a, c, g or t
  modified_base (1262871)..(1262877): a, c, g or t
  modified_base (1262880)..(1262881): a, c, g or t
  modified_base (1263806)..(1263809): a, c, g or t
  modified_base (1266620)..(1266620): a, c, g or t
  modified_base (1267311)..(1267311): a, c, g or t
  modified_base (1268258)..(1268258): a, c, g or t
  modified_base (1268464)..(1268464): a, c, g or t
  modified_base (1271576)..(1271576): a, c, g or t
  modified_base (1272316)..(1272316): a, c, g or t
  modified_base (1276048)..(1276048): a, c, g or t
  modified_base (1278490)..(1278491): a, c, g or t
  modified_base (1278494)..(1278498): a, c, g or t
  modified_base (1280404)..(1280404): a, c, g or t
  modified_base (1281488)..(1281488): a, c, g or t
  modified_base (1281490)..(1281493): a, c, g or t
  modified_base (1282046)..(1282046): a, c, g or t
  modified_base (1282058)..(1282058): a, c, g or t
  modified_base (1283691)..(1283691): a, c, g or t
  modified_base (1284212)..(1284212): a, c, g or t
  modified_base (1284767)..(1284770): a, c, g or t
  modified_base (1286487)..(1286487): a, c, g or t
  modified_base (1287096)..(1287102): a, c, g or t
  modified_base (1287635)..(1287635): a, c, g or t
  modified_base (1291436)..(1291436): a, c, g or t
  modified_base (1291839)..(1291839): a, c, g or t
  modified_base (1294397)..(1294397): a, c, g or t
  modified_base (1298599)..(1298599): a, c, g or t
  modified_base (1298754)..(1298754): a, c, g or t
  modified_base (1303271)..(1303271): a, c, g or t
  modified_base (1303275)..(1303277): a, c, g or t
  modified_base (1307233)..(1307233): a, c, g or t
  modified_base (1307741)..(1307741): a, c, g or t
  modified_base (1310577)..(1310577): a, c, g or t
  modified_base (1312263)..(1312263): a, c, g or t
  modified_base (1313349)..(1313349): a, c, g or t
  modified_base (1314821)..(1314821): a, c, g or t
  modified_base (1314872)..(1314882): a, c, g or t
  modified_base (1315434)..(1315438): a, c, g or t
  modified_base (1315645)..(1315645): a, c, g or t
  modified_base (1316814)..(1316814): a, c, g or t
  modified_base (1318118)..(1318118): a, c, g or t
  modified_base (1320185)..(1320187): a, c, g or t
  modified_base (1320189)..(1320194): a, c, g or t
  modified_base (1323825)..(1323825): a, c, g or t
  modified_base (1324648)..(1324648): a, c, g or t
  modified_base (1325200)..(1325203): a, c, g or t
  modified_base (1325371)..(1325371): a, c, g or t
  modified_base (1326909)..(1326909): a, c, g or t
  modified_base (1328263)..(1328270): a, c, g or t
  modified_base (1328277)..(1328278): a, c, g or t
  modified_base (1329817)..(1329817): a, c, g or t
  modified_base (1331232)..(1331232): a, c, g or t
  modified_base (1331439)..(1331439): a, c, g or t
  modified_base (1331620)..(1331621): a, c, g or t
  modified_base (1331624)..(1331628): a, c, g or t
  modified_base (1332791)..(1332795): a, c, g or t
  modified_base (1333054)..(1333054): a, c, g or t
  modified_base (1333299)..(1333299): a, c, g or t
  modified_base (1333418)..(1333418): a, c, g or t
  modified_base (1333919)..(1333919): a, c, g or t
  modified_base (1333973)..(1333973): a, c, g or t
  modified_base (1333999)..(1333999): a, c, g or t
  modified_base (1334011)..(1334012): a, c, g or t
  modified_base (1335064)..(1335065): a, c, g or t
  modified_base (1335582)..(1335582): a, c, g or t
  modified_base (1337840)..(1337840): a, c, g or t
  modified_base (1337846)..(1337847): a, c, g or t
  modified_base (1340412)..(1340412): a, c, g or t
  modified_base (1341097)..(1341097): a, c, g or t
  modified_base (1341563)..(1341569): a, c, g or t
  modified_base (1342551)..(1342558): a, c, g or t
  modified_base (1348479)..(1348479): a, c, g or t
  modified_base (1350257)..(1350258): a, c, g or t
  modified_base (1352169)..(1352170): a, c, g or t
  modified_base (1352259)..(1352262): a, c, g or t
  modified_base (1352267)..(1352271): a, c, g or t
  modified_base (1352317)..(1352320): a, c, g or t
  modified_base (1352324)..(1352387): a, c, g or t
  modified_base (1352423)..(1352465): a, c, g or t
  modified_base (1352656)..(1352656): a, c, g or t
  modified_base (1353430)..(1353433): a, c, g or t
  modified_base (1353435)..(1353435): a, c, g or t
  modified_base (1354508)..(1354509): a, c, g or t
  modified_base (1355307)..(1355307): a, c, g or t
  modified_base (1355697)..(1355699): a, c, g or t
  modified_base (1356949)..(1356951): a, c, g or t
  modified_base (1357170)..(1357181): a, c, g or t
  modified_base (1357350)..(1358587): a, c, g or t
  modified_base (1366839)..(1366839): a, c, g or t
  modified_base (1366888)..(1366954): a, c, g or t
  modified_base (1367332)..(1367333): a, c, g or t
  modified_base (1367339)..(1367340): a, c, g or t
  modified_base (1368232)..(1368232): a, c, g or t
  modified_base (1369858)..(1369858): a, c, g or t
  modified_base (1369867)..(1369872): a, c, g or t
  modified_base (1370929)..(1370929): a, c, g or t
  modified_base (1371105)..(1371105): a, c, g or t
  modified_base (1371108)..(1371115): a, c, g or t
  modified_base (1373576)..(1373576): a, c, g or t
  modified_base (1375527)..(1375530): a, c, g or t
  modified_base (1375582)..(1375582): a, c, g or t
  modified_base (1375587)..(1375596): a, c, g or t
  modified_base (1375601)..(1375601): a, c, g or t
  modified_base (1375717)..(1375720): a, c, g or t
  modified_base (1377373)..(1377373): a, c, g or t
  modified_base (1377385)..(1377385): a, c, g or t
  modified_base (1377427)..(1377427): a, c, g or t
  modified_base (1377484)..(1377484): a, c, g or t
  modified_base (1377628)..(1377628): a, c, g or t
  modified_base (1377652)..(1377652): a, c, g or t
  modified_base (1378226)..(1378229): a, c, g or t
  modified_base (1378272)..(1378272): a, c, g or t
  modified_base (1379300)..(1379303): a, c, g or t
  modified_base (1380794)..(1380794): a, c, g or t
  modified_base (1381050)..(1381050): a, c, g or t
  modified_base (1381132)..(1381132): a, c, g or t
  modified_base (1381170)..(1381170): a, c, g or t
  modified_base (1381532)..(1381536): a, c, g or t
  modified_base (1381584)..(1381584): a, c, g or t
  modified_base (1381586)..(1381586): a, c, g or t
  modified_base (1382512)..(1382554): a, c, g or t
  modified_base (1382657)..(1382696): a, c, g or t
  modified_base (1382843)..(1382898): a, c, g or t
  modified_base (1382932)..(1382971): a, c, g or t
  modified_base (1383336)..(1383336): a, c, g or t
  modified_base (1383462)..(1383462): a, c, g or t
  modified_base (1383464)..(1383465): a, c, g or t
  modified_base (1383470)..(1383470): a, c, g or t
  modified_base (1383549)..(1383559): a, c, g or t
  modified_base (1383623)..(1383628): a, c, g or t
  modified_base (1383659)..(1383659): a, c, g or t
  modified_base (1383667)..(1383681): a, c, g or t
  modified_base (1383758)..(1383766): a, c, g or t
  modified_base (1383971)..(1383971): a, c, g or t
  modified_base (1384102)..(1384102): a, c, g or t
  modified_base (1384312)..(1384312): a, c, g or t
  modified_base (1384456)..(1384456): a, c, g or t
  modified_base (1384462)..(1384466): a, c, g or t
  modified_base (1384475)..(1384478): a, c, g or t
  modified_base (1384525)..(1384525): a, c, g or t
  modified_base (1384529)..(1384529): a, c, g or t
  modified_base (1384533)..(1384547): a, c, g or t
  modified_base (1384556)..(1384557): a, c, g or t
  modified_base (1384670)..(1384670): a, c, g or t
  modified_base (1385004)..(1385007): a, c, g or t
  modified_base (1385009)..(1385011): a, c, g or t
  modified_base (1385026)..(1385026): a, c, g or t
  modified_base (1385107)..(1385109): a, c, g or t
  modified_base (1385288)..(1385288): a, c, g or t
  modified_base (1385378)..(1385416): a, c, g or t
  modified_base (1385532)..(1385532): a, c, g or t
  modified_base (1385598)..(1385598): a, c, g or t
  modified_base (1385607)..(1385648): a, c, g or t
  modified_base (1385779)..(1385784): a, c, g or t
  modified_base (1385874)..(1385874): a, c, g or t
  modified_base (1385995)..(1385997): a, c, g or t
  modified_base (1386004)..(1386005): a, c, g or t
  modified_base (1386011)..(1386011): a, c, g or t
  modified_base (1386237)..(1386237): a, c, g or t
  modified_base (1386292)..(1386292): a, c, g or t
  modified_base (1386321)..(1386323): a, c, g or t
  modified_base (1386325)..(1386326): a, c, g or t
  modified_base (1386385)..(1386385): a, c, g or t
  modified_base (1386460)..(1386463): a, c, g or t
  modified_base (1386563)..(1386567): a, c, g or t
  modified_base (1386571)..(1386571): a, c, g or t
  modified_base (1386574)..(1386574): a, c, g or t
  modified_base (1386838)..(1386838): a, c, g or t
  modified_base (1386873)..(1386873): a, c, g or t
  modified_base (1386883)..(1386883): a, c, g or t
  modified_base (1386904)..(1386904): a, c, g or t
  modified_base (1386919)..(1386919): a, c, g or t
  modified_base (1386958)..(1386958): a, c, g or t
  modified_base (1386990)..(1386990): a, c, g or t
  modified_base (1386997)..(1386997): a, c, g or t
  modified_base (1387190)..(1387204): a, c, g or t
  modified_base (1387249)..(1387249): a, c, g or t
  modified_base (1387300)..(1387300): a, c, g or t
  modified_base (1387321)..(1387321): a, c, g or t
  modified_base (1387372)..(1387372): a, c, g or t
  modified_base (1387384)..(1387384): a, c, g or t
  modified_base (1387429)..(1387607): a, c, g or t
  modified_base (1387647)..(1387715): a, c, g or t
  modified_base (1387718)..(1387721): a, c, g or t
  modified_base (1387730)..(1387731): a, c, g or t
  modified_base (1387792)..(1387854): a, c, g or t
  modified_base (1387889)..(1387935): a, c, g or t
  modified_base (1387938)..(1387940): a, c, g or t
  modified_base (1387946)..(1387947): a, c, g or t
  modified_base (1387977)..(1387978): a, c, g or t
  modified_base (1387980)..(1388001): a, c, g or t
  modified_base (1388011)..(1388012): a, c, g or t
  modified_base (1388016)..(1388019): a, c, g or t
  modified_base (1388115)..(1388119): a, c, g or t
  modified_base (1388122)..(1388122): a, c, g or t
  modified_base (1388137)..(1388142): a, c, g or t
  modified_base (1388173)..(1388186): a, c, g or t
  modified_base (1388210)..(1388219): a, c, g or t
  modified_base (1388224)..(1388224): a, c, g or t
  modified_base (1388271)..(1388355): a, c, g or t
  modified_base (1388357)..(1388358): a, c, g or t
  modified_base (1388406)..(1388495): a, c, g or t
  modified_base (1388522)..(1388522): a, c, g or t
  modified_base (1388593)..(1388630): a, c, g or t
  modified_base (1388633)..(1388633): a, c, g or t
  modified_base (1388669)..(1388738): a, c, g or t
  modified_base (1388775)..(1388844): a, c, g or t
  modified_base (1388871)..(1388937): a, c, g or t
  modified_base (1388961)..(1389295): a, c, g or t
  modified_base (1389305)..(1389308): a, c, g or t
  modified_base (1389331)..(1389406): a, c, g or t
  modified_base (1389430)..(1389543): a, c, g or t
  modified_base (1389569)..(1389569): a, c, g or t
  modified_base (1389571)..(1389572): a, c, g or t
  modified_base (1389574)..(1389575): a, c, g or t
  modified_base (1389577)..(1389618): a, c, g or t
  modified_base (1389700)..(1389704): a, c, g or t
  modified_base (1389718)..(1389719): a, c, g or t
  modified_base (1389764)..(1389803): a, c, g or t
  modified_base (1389805)..(1389806): a, c, g or t
  modified_base (1389865)..(1389866): a, c, g or t
  modified_base (1389889)..(1389890): a, c, g or t
  modified_base (1389919)..(1390076): a, c, g or t
  modified_base (1390078)..(1390082): a, c, g or t
  modified_base (1390124)..(1390145): a, c, g or t
  modified_base (1390159)..(1390159): a, c, g or t
  modified_base (1390172)..(1390173): a, c, g or t
  modified_base (1390175)..(1390182): a, c, g or t
  modified_base (1390208)..(1390208): a, c, g or t
  modified_base (1390224)..(1390253): a, c, g or t
  modified_base (1390386)..(1390427): a, c, g or t
  modified_base (1390459)..(1390466): a, c, g or t
  modified_base (1390518)..(1390522): a, c, g or t
  modified_base (1390551)..(1390554): a, c, g or t
  modified_base (1390556)..(1390612): a, c, g or t
  modified_base (1390642)..(1390682): a, c, g or t
  modified_base (1390718)..(1390719): a, c, g or t
  modified_base (1390752)..(1390765): a, c, g or t
  modified_base (1390789)..(1390841): a, c, g or t
  modified_base (1390853)..(1390854): a, c, g or t
  modified_base (1390865)..(1390954): a, c, g or t
  modified_base (1390994)..(1391033): a, c, g or t
  modified_base (1391058)..(1391174): a, c, g or t
  modified_base (1391206)..(1391240): a, c, g or t
  modified_base (1391263)..(1391305): a, c, g or t
  modified_base (1391334)..(1391384): a, c, g or t
  modified_base (1391604)..(1391655): a, c, g or t
  modified_base (1391681)..(1391693): a, c, g or t
  modified_base (1391724)..(1391724): a, c, g or t
  modified_base (1391729)..(1391729): a, c, g or t
  modified_base (1391807)..(1391810): a, c, g or t
  modified_base (1391855)..(1391862): a, c, g or t
  modified_base (1391923)..(1391925): a, c, g or t
  modified_base (1391968)..(1391969): a, c, g or t
  modified_base (1392020)..(1392071): a, c, g or t
  modified_base (1392074)..(1392074): a, c, g or t
  modified_base (1392324)..(1392332): a, c, g or t
  modified_base (1392335)..(1392338): a, c, g or t
  modified_base (1392360)..(1392360): a, c, g or t
  modified_base (1392399)..(1392399): a, c, g or t
  modified_base (1392404)..(1392410): a, c, g or t
  modified_base (1392420)..(1392421): a, c, g or t
  modified_base (1392434)..(1392440): a, c, g or t
  modified_base (1392487)..(1392490): a, c, g or t
  modified_base (1392492)..(1392499): a, c, g or t
  modified_base (1392528)..(1392550): a, c, g or t
  modified_base (1392562)..(1392563): a, c, g or t
  modified_base (1392579)..(1392580): a, c, g or t
  modified_base (1392583)..(1392585): a, c, g or t
  modified_base (1392587)..(1392588): a, c, g or t
  modified_base (1392630)..(1392641): a, c, g or t
  modified_base (1392691)..(1392703): a, c, g or t
  modified_base (1392756)..(1392803): a, c, g or t
  modified_base (1392853)..(1392856): a, c, g or t
  modified_base (1392858)..(1392977): a, c, g or t
  modified_base (1393015)..(1393015): a, c, g or t
  modified_base (1393038)..(1393079): a, c, g or t
  modified_base (1393107)..(1393153): a, c, g or t
  modified_base (1393155)..(1393155): a, c, g or t
  modified_base (1393221)..(1393222): a, c, g or t
  modified_base (1393233)..(1393234): a, c, g or t
  modified_base (1393236)..(1393237): a, c, g or t
  modified_base (1393470)..(1393470): a, c, g or t
  modified_base (1393576)..(1393577): a, c, g or t
  modified_base (1393598)..(1393599): a, c, g or t
  modified_base (1393872)..(1393872): a, c, g or t
  modified_base (1393897)..(1393897): a, c, g or t
  modified_base (1393959)..(1393960): a, c, g or t
  modified_base (1394228)..(1394228): a, c, g or t
  modified_base (1394231)..(1394232): a, c, g or t
  modified_base (1394252)..(1394252): a, c, g or t
  modified_base (1395101)..(1395101): a, c, g or t
  modified_base (1395200)..(1395201): a, c, g or t
  modified_base (1395353)..(1395353): a, c, g or t
  modified_base (1396060)..(1396060): a, c, g or t
  modified_base (1396339)..(1396339): a, c, g or t
  modified_base (1396403)..(1396403): a, c, g or t
  modified_base (1396406)..(1396410): a, c, g or t
  modified_base (1396769)..(1396783): a, c, g or t
  modified_base (1397426)..(1397426): a, c, g or t
  modified_base (1397848)..(1397848): a, c, g or t
  modified_base (1397855)..(1397855): a, c, g or t
  modified_base (1398406)..(1398407): a, c, g or t
  modified_base (1398534)..(1398548): a, c, g or t
  modified_base (1398602)..(1398603): a, c, g or t
  modified_base (1398617)..(1398618): a, c, g or t
  modified_base (1398620)..(1398622): a, c, g or t
  modified_base (1398627)..(1398634): a, c, g or t
  modified_base (1398638)..(1398638): a, c, g or t
  modified_base (1398641)..(1398642): a, c, g or t
  modified_base (1398705)..(1398705): a, c, g or t
  modified_base (1398792)..(1398792): a, c, g or t
  modified_base (1398816)..(1398816): a, c, g or t
  modified_base (1398849)..(1398859): a, c, g or t
  modified_base (1398861)..(1398862): a, c, g or t
  modified_base (1398883)..(1398907): a, c, g or t
  modified_base (1398909)..(1398910): a, c, g or t
  modified_base (1398942)..(1398942): a, c, g or t
  modified_base (1399172)..(1399172): a, c, g or t
  modified_base (1399260)..(1399260): a, c, g or t
  modified_base (1399310)..(1399310): a, c, g or t
  modified_base (1399315)..(1399315): a, c, g or t
  modified_base (1399426)..(1399426): a, c, g or t
  modified_base (1399450)..(1399450): a, c, g or t
  modified_base (1399577)..(1399577): a, c, g or t
  modified_base (1399778)..(1399781): a, c, g or t
  modified_base (1399787)..(1399823): a, c, g or t
  modified_base (1400090)..(1400090): a, c, g or t
  modified_base (1400105)..(1400109): a, c, g or t
  modified_base (1400124)..(1400163): a, c, g or t
  modified_base (1400207)..(1400247): a, c, g or t
  modified_base (1400552)..(1400553): a, c, g or t
  modified_base (1400979)..(1400983): a, c, g or t
  modified_base (1405255)..(1405260): a, c, g or t
  modified_base (1405494)..(1405505): a, c, g or t
  modified_base (1406417)..(1406417): a, c, g or t
  modified_base (1406764)..(1406764): a, c, g or t
  modified_base (1406792)..(1406793): a, c, g or t
  modified_base (1406797)..(1406805): a, c, g or t
  modified_base (1406830)..(1406831): a, c, g or t
  modified_base (1406883)..(1406884): a, c, g or t
  modified_base (1406886)..(1406889): a, c, g or t
  modified_base (1407458)..(1407504): a, c, g or t
  modified_base (1407507)..(1407508): a, c, g or t
  modified_base (1407891)..(1407891): a, c, g or t
  modified_base (1408275)..(1408280): a, c, g or t
  modified_base (1408933)..(1408934): a, c, g or t
  modified_base (1409218)..(1409219): a, c, g or t
  modified_base (1409708)..(1409708): a, c, g or t
  modified_base (1412823)..(1412826): a, c, g or t
  modified_base (1413103)..(1413104): a, c, g or t
  modified_base (1413106)..(1413107): a, c, g or t
  modified_base (1414767)..(1414767): a, c, g or t
  modified_base (1415091)..(1415091): a, c, g or t
  modified_base (1416038)..(1416044): a, c, g or t
  modified_base (1416903)..(1416903): a, c, g or t
  modified_base (1418014)..(1418014): a, c, g or t
  modified_base (1418338)..(1418338): a, c, g or t
  modified_base (1419031)..(1419040): a, c, g or t
  modified_base (1421619)..(1421619): a, c, g or t
  modified_base (1421628)..(1421629): a, c, g or t
  modified_base (1423341)..(1423341): a, c, g or t
  modified_base (1427439)..(1427439): a, c, g or t
  modified_base (1427546)..(1427551): a, c, g or t
  modified_base (1427913)..(1427913): a, c, g or t
  modified_base (1432186)..(1432189): a, c, g or t
  modified_base (1432998)..(1432998): a, c, g or t
  modified_base (1433516)..(1433523): a, c, g or t
  modified_base (1437134)..(1437137): a, c, g or t
  modified_base (1437426)..(1437426): a, c, g or t
  modified_base (1438534)..(1438534): a, c, g or t
  modified_base (1439640)..(1439640): a, c, g or t
  modified_base (1441530)..(1441530): a, c, g or t
  modified_base (1442941)..(1442965): a, c, g or t
  modified_base (1443380)..(1443381): a, c, g or t
  modified_base (1443541)..(1443544): a, c, g or t
  modified_base (1445050)..(1445050): a, c, g or t
  modified_base (1445178)..(1445178): a, c, g or t
  modified_base (1445340)..(1445344): a, c, g or t
  modified_base (1445752)..(1445752): a, c, g or t
  modified_base (1445757)..(1445757): a, c, g or t
  modified_base (1447007)..(1447007): a, c, g or t
  modified_base (1447062)..(1447062): a, c, g or t
  modified_base (1447088)..(1447088): a, c, g or t
  modified_base (1447499)..(1447499): a, c, g or t
  modified_base (1447684)..(1447684): a, c, g or t
  modified_base (1450086)..(1450091): a, c, g or t
  modified_base (1450413)..(1450413): a, c, g or t
  modified_base (1450416)..(1450416): a, c, g or t
  modified_base (1450987)..(1450987): a, c, g or t
  modified_base (1451157)..(1451157): a, c, g or t
  modified_base (1451872)..(1451872): a, c, g or t
  modified_base (1453118)..(1453118): a, c, g or t
  modified_base (1457272)..(1457272): a, c, g or t
  modified_base (1458070)..(1458070): a, c, g or t
  modified_base (1459429)..(1459430): a, c, g or t
  modified_base (1461997)..(1461998): a, c, g or t
  modified_base (1462539)..(1462539): a, c, g or t
  modified_base (1463127)..(1463130): a, c, g or t
  modified_base (1464818)..(1464818): a, c, g or t
  modified_base (1466171)..(1466171): a, c, g or t
  modified_base (1467834)..(1467834): a, c, g or t
  modified_base (1471769)..(1471769): a, c, g or t
  modified_base (1471797)..(1471797): a, c, g or t
  modified_base (1472999)..(1473000): a, c, g or t
  modified_base (1474026)..(1474026): a, c, g or t
  modified_base (1474427)..(1474427): a, c, g or t
  modified_base (1475844)..(1475851): a, c, g or t
  modified_base (1475865)..(1475866): a, c, g or t
  modified_base (1476712)..(1476712): a, c, g or t
  modified_base (1476923)..(1476923): a, c, g or t
  modified_base (1476940)..(1476940): a, c, g or t
  modified_base (1481318)..(1481322): a, c, g or t
  modified_base (1481908)..(1481908): a, c, g or t
  modified_base (1482389)..(1482389): a, c, g or t
  modified_base (1483287)..(1483287): a, c, g or t
  modified_base (1484902)..(1484902): a, c, g or t
  modified_base (1485652)..(1485652): a, c, g or t
  modified_base (1486788)..(1486788): a, c, g or t
  modified_base (1487836)..(1487836): a, c, g or t
  modified_base (1487857)..(1487857): a, c, g or t
  modified_base (1487972)..(1487972): a, c, g or t
  modified_base (1487975)..(1487975): a, c, g or t
  modified_base (1488366)..(1488366): a, c, g or t
  modified_base (1489246)..(1489246): a, c, g or t
  modified_base (1490015)..(1490019): a, c, g or t
  modified_base (1490196)..(1490196): a, c, g or t
  modified_base (1492278)..(1492278): a, c, g or t
  modified_base (1493706)..(1493706): a, c, g or t
  modified_base (1493929)..(1493930): a, c, g or t
  modified_base (1494624)..(1494624): a, c, g or t
  modified_base (1495870)..(1495880): a, c, g or t
  modified_base (1496006)..(1496012): a, c, g or t
  modified_base (1497023)..(1497023): a, c, g or t
  modified_base (1497069)..(1497073): a, c, g or t
  modified_base (1497757)..(1497757): a, c, g or t
  modified_base (1497759)..(1497759): a, c, g or t
  modified_base (1499384)..(1499384): a, c, g or t
  modified_base (1499708)..(1499708): a, c, g or t
  modified_base (1499938)..(1499953): a, c, g or t
  modified_base (1500773)..(1500791): a, c, g or t
  modified_base (1501228)..(1501228): a, c, g or t
  modified_base (1501911)..(1501916): a, c, g or t
  modified_base (1502298)..(1502298): a, c, g or t
  modified_base (1502389)..(1502389): a, c, g or t
  modified_base (1502394)..(1502394): a, c, g or t
  modified_base (1502573)..(1502575): a, c, g or t
  modified_base (1502577)..(1502577): a, c, g or t
  modified_base (1502603)..(1502607): a, c, g or t
  modified_base (1502610)..(1502610): a, c, g or t
  modified_base (1502622)..(1502622): a, c, g or t
  modified_base (1502652)..(1502652): a, c, g or t
  modified_base (1502694)..(1502700): a, c, g or t
  modified_base (1502705)..(1502706): a, c, g or t
  modified_base (1502762)..(1502768): a, c, g or t
  modified_base (1502772)..(1502773): a, c, g or t
  modified_base (1502789)..(1502816): a, c, g or t
  modified_base (1502848)..(1502854): a, c, g or t
  modified_base (1502933)..(1502950): a, c, g or t
  modified_base (1502956)..(1502956): a, c, g or t
  modified_base (1503060)..(1503060): a, c, g or t
  modified_base (1503096)..(1503099): a, c, g or t
  modified_base (1503183)..(1503183): a, c, g or t
  modified_base (1504519)..(1504519): a, c, g or t
  modified_base (1505266)..(1505269): a, c, g or t
  modified_base (1505400)..(1505400): a, c, g or t
  modified_base (1506851)..(1506851): a, c, g or t
  modified_base (1506853)..(1506854): a, c, g or t
  modified_base (1506856)..(1506857): a, c, g or t
  modified_base (1507910)..(1507910): a, c, g or t
  modified_base (1508335)..(1508339): a, c, g or t
  modified_base (1509137)..(1509137): a, c, g or t
  modified_base (1509752)..(1509752): a, c, g or t
  modified_base (1510869)..(1510869): a, c, g or t
  modified_base (1510915)..(1510915): a, c, g or t
  modified_base (1511381)..(1511381): a, c, g or t
  modified_base (1511406)..(1511406): a, c, g or t
  modified_base (1512185)..(1512186): a, c, g or t
  modified_base (1512190)..(1512191): a, c, g or t
  modified_base (1512837)..(1512837): a, c, g or t
  modified_base (1513073)..(1513073): a, c, g or t
  modified_base (1513612)..(1513616): a, c, g or t
  modified_base (1513714)..(1513714): a, c, g or t
  modified_base (1514240)..(1514240): a, c, g or t
  modified_base (1514277)..(1514513): a, c, g or t
  modified_base (1514528)..(1514532): a, c, g or t
  modified_base (1514564)..(1514564): a, c, g or t
  modified_base (1514616)..(1514859): a, c, g or t
  modified_base (1514889)..(1514937): a, c, g or t
  modified_base (1514950)..(1514950): a, c, g or t
  modified_base (1514972)..(1514972): a, c, g or t
  modified_base (1514977)..(1515019): a, c, g or t
  modified_base (1515030)..(1515031): a, c, g or t
  modified_base (1515055)..(1515098): a, c, g or t
  modified_base (1515119)..(1515120): a, c, g or t
  modified_base (1515132)..(1515179): a, c, g or t
  modified_base (1515182)..(1515183): a, c, g or t
  modified_base (1515213)..(1515263): a, c, g or t
  modified_base (1515290)..(1515444): a, c, g or t
  modified_base (1515451)..(1515452): a, c, g or t
  modified_base (1515456)..(1515457): a, c, g or t
  modified_base (1515461)..(1515462): a, c, g or t
  modified_base (1515483)..(1515483): a, c, g or t
  modified_base (1515490)..(1515564): a, c, g or t
  modified_base (1515595)..(1515707): a, c, g or t
  modified_base (1515718)..(1515719): a, c, g or t
  modified_base (1515724)..(1515727): a, c, g or t
  modified_base (1515731)..(1515736): a, c, g or t
  modified_base (1515738)..(1515738): a, c, g or t
  modified_base (1515747)..(1515748): a, c, g or t
  modified_base (1515758)..(1515801): a, c, g or t
  modified_base (1515928)..(1515928): a, c, g or t
  modified_base (1515937)..(1515937): a, c, g or t
  modified_base (1515940)..(1515940): a, c, g or t
  modified_base (1515943)..(1515943): a, c, g or t
  modified_base (1515967)..(1516010): a, c, g or t
  modified_base (1516074)..(1516138): a, c, g or t
  modified_base (1516149)..(1516149): a, c, g or t
  modified_base (1516154)..(1516154): a, c, g or t
  modified_base (1516221)..(1516225): a, c, g or t
  modified_base (1516376)..(1516396): a, c, g or t
  modified_base (1516402)..(1516402): a, c, g or t
  modified_base (1516486)..(1516493): a, c, g or t
  modified_base (1516537)..(1516590): a, c, g or t
  modified_base (1516592)..(1516593): a, c, g or t
  modified_base (1516632)..(1516633): a, c, g or t
  modified_base (1516635)..(1516640): a, c, g or t
  modified_base (1516654)..(1516654): a, c, g or t
  modified_base (1516664)..(1516665): a, c, g or t
  modified_base (1516671)..(1516923): a, c, g or t
  modified_base (1516929)..(1516931): a, c, g or t
  modified_base (1516946)..(1516946): a, c, g or t
  modified_base (1516977)..(1517031): a, c, g or t
  modified_base (1517090)..(1517207): a, c, g or t
  modified_base (1517216)..(1517217): a, c, g or t
  modified_base (1517229)..(1517352): a, c, g or t
  modified_base (1517381)..(1517392): a, c, g or t
  modified_base (1517406)..(1517406): a, c, g or t
  modified_base (1517439)..(1517498): a, c, g or t
  modified_base (1517501)..(1517502): a, c, g or t
  modified_base (1517536)..(1517579): a, c, g or t
  modified_base (1517607)..(1517650): a, c, g or t
  modified_base (1517667)..(1517668): a, c, g or t
  modified_base (1517716)..(1517719): a, c, g or t
  modified_base (1517755)..(1517799): a, c, g or t
  modified_base (1517862)..(1517899): a, c, g or t
  modified_base (1517932)..(1517932): a, c, g or t
  modified_base (1517935)..(1518237): a, c, g or t
  modified_base (1518270)..(1518273): a, c, g or t
  modified_base (1518275)..(1518334): a, c, g or t
  modified_base (1518378)..(1518392): a, c, g or t
  modified_base (1518408)..(1518408): a, c, g or t
  modified_base (1518416)..(1518425): a, c, g or t
  modified_base (1518444)..(1518445): a, c, g or t
  modified_base (1518449)..(1518450): a, c, g or t
  modified_base (1518454)..(1518454): a, c, g or t
  modified_base (1518474)..(1518479): a, c, g or t
  modified_base (1518503)..(1518531): a, c, g or t
  modified_base (1518540)..(1518540): a, c, g or t
  modified_base (1518552)..(1518552): a, c, g or t
  modified_base (1518555)..(1518576): a, c, g or t
  modified_base (1518600)..(1518607): a, c, g or t
  modified_base (1518634)..(1518644): a, c, g or t
  modified_base (1518668)..(1518718): a, c, g or t
  modified_base (1518743)..(1518743): a, c, g or t
  modified_base (1518763)..(1518930): a, c, g or t
  modified_base (1518954)..(1519119): a, c, g or t
  modified_base (1519207)..(1519254): a, c, g or t
  modified_base (1519258)..(1519259): a, c, g or t
  modified_base (1519333)..(1519339): a, c, g or t
  modified_base (1520026)..(1520026): a, c, g or t
  modified_base (1520112)..(1520112): a, c, g or t
  modified_base (1520177)..(1520177): a, c, g or t
  modified_base (1520230)..(1520234): a, c, g or t
  modified_base (1520273)..(1520273): a, c, g or t
  modified_base (1520309)..(1520309): a, c, g or t
  modified_base (1520596)..(1520598): a, c, g or t
  modified_base (1520654)..(1520668): a, c, g or t
  modified_base (1520693)..(1520737): a, c, g or t
  modified_base (1520809)..(1520824): a, c, g or t
  modified_base (1520894)..(1521090): a, c, g or t
  modified_base (1521094)..(1521095): a, c, g or t
  modified_base (1521113)..(1521115): a, c, g or t
  modified_base (1521149)..(1521150): a, c, g or t
  modified_base (1521189)..(1521200): a, c, g or t
  modified_base (1521209)..(1521210): a, c, g or t
  modified_base (1521212)..(1521215): a, c, g or t
  modified_base (1521218)..(1521219): a, c, g or t
  modified_base (1521221)..(1521222): a, c, g or t
  modified_base (1521224)..(1521254): a, c, g or t
  modified_base (1521256)..(1521257): a, c, g or t
  modified_base (1521260)..(1521261): a, c, g or t
  modified_base (1521270)..(1521271): a, c, g or t
  modified_base (1521301)..(1521311): a, c, g or t
  modified_base (1521315)..(1521316): a, c, g or t
  modified_base (1521361)..(1521362): a, c, g or t
  modified_base (1521367)..(1521367): a, c, g or t
  modified_base (1521465)..(1521465): a, c, g or t
  modified_base (1521526)..(1521527): a, c, g or t
  modified_base (1521531)..(1521532): a, c, g or t
  modified_base (1521606)..(1521607): a, c, g or t
  modified_base (1521611)..(1521612): a, c, g or t
  modified_base (1521626)..(1521627): a, c, g or t
  modified_base (1521629)..(1521630): a, c, g or t
  modified_base (1521662)..(1521663): a, c, g or t
  modified_base (1521666)..(1521667): a, c, g or t
  modified_base (1521759)..(1521760): a, c, g or t
  modified_base (1521762)..(1521763): a, c, g or t
  modified_base (1522278)..(1522281): a, c, g or t
  modified_base (1522332)..(1522335): a, c, g or t
  modified_base (1522338)..(1522339): a, c, g or t
  modified_base (1522576)..(1522579): a, c, g or t
  modified_base (1522742)..(1522743): a, c, g or t
  modified_base (1522935)..(1522938): a, c, g or t
  modified_base (1522969)..(1522970): a, c, g or t
  modified_base (1522974)..(1523047): a, c, g or t
  modified_base (1523071)..(1523076): a, c, g or t
  modified_base (1523111)..(1523112): a, c, g or t
  modified_base (1523115)..(1523116): a, c, g or t
  modified_base (1523119)..(1523272): a, c, g or t
  modified_base (1523296)..(1523306): a, c, g or t
  modified_base (1523338)..(1523382): a, c, g or t
  modified_base (1523404)..(1523414): a, c, g or t
  modified_base (1523418)..(1523419): a, c, g or t
  modified_base (1523438)..(1523440): a, c, g or t
  modified_base (1523483)..(1523506): a, c, g or t
  modified_base (1523532)..(1524912): a, c, g or t
  modified_base (1524936)..(1524963): a, c, g or t
  modified_base (1524968)..(1524969): a, c, g or t
  modified_base (1524995)..(1524995): a, c, g or t
  modified_base (1525020)..(1525045): a, c, g or t
  modified_base (1525065)..(1525065): a, c, g or t
  modified_base (1525068)..(1525107): a, c, g or t
  modified_base (1525111)..(1525111): a, c, g or t
  modified_base (1525128)..(1525175): a, c, g or t
  modified_base (1525780)..(1525780): a, c, g or t
  modified_base (1526424)..(1526425): a, c, g or t
  modified_base (1526429)..(1526431): a, c, g or t
  modified_base (1526436)..(1526442): a, c, g or t
  modified_base (1526445)..(1526447): a, c, g or t
  modified_base (1526467)..(1526468): a, c, g or t
  modified_base (1526474)..(1526492): a, c, g or t
  modified_base (1526514)..(1526514): a, c, g or t
  modified_base (1526520)..(1526523): a, c, g or t
  modified_base (1526525)..(1526528): a, c, g or t
  modified_base (1526537)..(1526538): a, c, g or t
  modified_base (1526542)..(1526543): a, c, g or t
  modified_base (1526545)..(1526547): a, c, g or t
  modified_base (1526551)..(1526552): a, c, g or t
  modified_base (1526556)..(1526557): a, c, g or t
  modified_base (1526571)..(1526849): a, c, g or t
  modified_base (1526873)..(1527022): a, c, g or t
  modified_base (1527035)..(1527035): a, c, g or t
  modified_base (1527047)..(1527048): a, c, g or t
  modified_base (1527057)..(1527058): a, c, g or t
  modified_base (1527069)..(1527070): a, c, g or t
  modified_base (1528400)..(1528446): a, c, g or t
  modified_base (1528641)..(1528642): a, c, g or t
  modified_base (1528674)..(1528677): a, c, g or t
  modified_base (1528828)..(1528829): a, c, g or t
  modified_base (1528862)..(1528863): a, c, g or t
  modified_base (1529032)..(1529032): a, c, g or t
  modified_base (1529338)..(1529339): a, c, g or t
  modified_base (1529848)..(1529851): a, c, g or t
  modified_base (1529854)..(1529854): a, c, g or t
  modified_base (1530014)..(1530014): a, c, g or t
  modified_base (1530088)..(1530088): a, c, g or t
  modified_base (1530304)..(1530304): a, c, g or t
  modified_base (1530380)..(1530381): a, c, g or t
  modified_base (1530383)..(1530383): a, c, g or t
  modified_base (1530385)..(1530388): a, c, g or t
  modified_base (1530956)..(1530956): a, c, g or t
  modified_base (1531783)..(1531783): a, c, g or t
  modified_base (1531891)..(1531891): a, c, g or t
  modified_base (1531899)..(1531899): a, c, g or t
  modified_base (1532702)..(1532702): a, c, g or t
  modified_base (1536239)..(1536239): a, c, g or t
  modified_base (1536639)..(1536639): a, c, g or t
  modified_base (1537969)..(1537974): a, c, g or t
  modified_base (1537979)..(1537979): a, c, g or t
  modified_base (1538592)..(1538592): a, c, g or t
  modified_base (1539373)..(1539376): a, c, g or t
  modified_base (1540736)..(1540736): a, c, g or t
  modified_base (1540995)..(1540995): a, c, g or t
  modified_base (1540997)..(1541000): a, c, g or t
  modified_base (1541715)..(1541715): a, c, g or t
  modified_base (1542031)..(1542031): a, c, g or t
  modified_base (1543653)..(1543653): a, c, g or t
  modified_base (1544249)..(1544252): a, c, g or t
  modified_base (1545249)..(1545252): a, c, g or t
  modified_base (1545537)..(1545540): a, c, g or t
  modified_base (1547198)..(1547198): a, c, g or t
  modified_base (1547832)..(1547832): a, c, g or t
  modified_base (1549519)..(1549520): a, c, g or t
  modified_base (1550557)..(1550563): a, c, g or t
  modified_base (1552254)..(1552254): a, c, g or t
  modified_base (1552650)..(1552650): a, c, g or t
  modified_base (1553140)..(1553140): a, c, g or t
  modified_base (1555936)..(1555936): a, c, g or t
  modified_base (1558124)..(1558128): a, c, g or t
  modified_base (1563281)..(1563281): a, c, g or t
  modified_base (1563358)..(1563378): a, c, g or t
  modified_base (1565745)..(1565745): a, c, g or t
  modified_base (1566104)..(1566107): a, c, g or t
  modified_base (1566621)..(1566621): a, c, g or t
  modified_base (1566630)..(1566630): a, c, g or t
  modified_base (1567579)..(1567579): a, c, g or t
  modified_base (1568515)..(1568515): a, c, g or t
  modified_base (1568997)..(1568997): a, c, g or t
  modified_base (1569281)..(1569281): a, c, g or t
  modified_base (1570168)..(1570169): a, c, g or t
  modified_base (1570171)..(1570190): a, c, g or t
  modified_base (1573347)..(1573347): a, c, g or t
  modified_base (1573626)..(1573627): a, c, g or t
  modified_base (1573631)..(1573632): a, c, g or t
  modified_base (1573634)..(1573637): a, c, g or t
  modified_base (1577304)..(1577304): a, c, g or t
  modified_base (1577306)..(1577309): a, c, g or t
  modified_base (1579368)..(1579379): a, c, g or t
  modified_base (1579382)..(1579382): a, c, g or t
  modified_base (1581352)..(1581352): a, c, g or t
  modified_base (1581517)..(1581517): a, c, g or t
  modified_base (1581645)..(1581645): a, c, g or t
  modified_base (1581977)..(1581977): a, c, g or t
  modified_base (1583856)..(1583856): a, c, g or t
  modified_base (1584635)..(1584635): a, c, g or t
  modified_base (1585239)..(1585240): a, c, g or t
  modified_base (1585535)..(1585538): a, c, g or t
  modified_base (1588007)..(1588007): a, c, g or t
  modified_base (1588033)..(1588033): a, c, g or t
  modified_base (1588400)..(1588403): a, c, g or t
  modified_base (1591039)..(1591039): a, c, g or t
  modified_base (1591400)..(1591401): a, c, g or t
  modified_base (1591418)..(1591418): a, c, g or t
  modified_base (1593874)..(1593875): a, c, g or t
  modified_base (1593877)..(1593880): a, c, g or t
  modified_base (1597600)..(1597600): a, c, g or t
  modified_base (1598156)..(1598156): a, c, g or t
  modified_base (1598577)..(1598577): a, c, g or t
  modified_base (1599260)..(1599260): a, c, g or t
  modified_base (1600606)..(1600606): a, c, g or t
  modified_base (1601553)..(1601556): a, c, g or t
  modified_base (1602674)..(1602674): a, c, g or t
  modified_base (1602680)..(1602680): a, c, g or t
  modified_base (1602740)..(1602740): a, c, g or t
  modified_base (1605340)..(1605340): a, c, g or t
  modified_base (1606420)..(1606420): a, c, g or t
  modified_base (1608402)..(1608402): a, c, g or t
  modified_base (1609525)..(1609525): a, c, g or t
  modified_base (1609705)..(1609706): a, c, g or t
  modified_base (1610253)..(1610253): a, c, g or t
  modified_base (1613661)..(1613676): a, c, g or t
  modified_base (1615254)..(1615254): a, c, g or t
  modified_base (1615461)..(1615465): a, c, g or t
  modified_base (1617517)..(1617517): a, c, g or t
  modified_base (1619468)..(1619468): a, c, g or t
  modified_base (1619544)..(1619545): a, c, g or t
  modified_base (1619547)..(1619549): a, c, g or t
  modified_base (1619593)..(1619621): a, c, g or t
  modified_base (1619683)..(1619683): a, c, g or t
  modified_base (1622722)..(1622731): a, c, g or t
  modified_base (1622733)..(1622734): a, c, g or t
  modified_base (1623156)..(1623156): a, c, g or t
  modified_base (1628742)..(1628743): a, c, g or t
  modified_base (1631248)..(1631248): a, c, g or t
  modified_base (1632084)..(1632084): a, c, g or t
  modified_base (1633937)..(1633938): a, c, g or t
  modified_base (1636037)..(1636037): a, c, g or t
  modified_base (1636343)..(1636343): a, c, g or t
  modified_base (1636984)..(1636987): a, c, g or t
  modified_base (1637722)..(1637722): a, c, g or t
  modified_base (1637878)..(1637880): a, c, g or t
  modified_base (1638524)..(1638524): a, c, g or t
  modified_base (1640611)..(1640613): a, c, g or t
  modified_base (1640710)..(1640711): a, c, g or t
  modified_base (1640749)..(1640761): a, c, g or t
  modified_base (1641123)..(1641131): a, c, g or t
  modified_base (1642104)..(1642104): a, c, g or t
  modified_base (1642367)..(1642367): a, c, g or t
  modified_base (1643090)..(1643103): a, c, g or t
  modified_base (1643105)..(1643106): a, c, g or t
  modified_base (1643112)..(1643113): a, c, g or t
  modified_base (1643847)..(1643852): a, c, g or t
  modified_base (1646645)..(1646649): a, c, g or t
  modified_base (1646908)..(1646911): a, c, g or t
  modified_base (1648639)..(1648639): a, c, g or t
  modified_base (1649095)..(1649095): a, c, g or t
  modified_base (1649460)..(1649470): a, c, g or t
  modified_base (1655844)..(1655844): a, c, g or t
  modified_base (1655848)..(1655850): a, c, g or t
  modified_base (1656382)..(1656393): a, c, g or t
  modified_base (1657874)..(1657874): a, c, g or t
  modified_base (1660275)..(1660275): a, c, g or t
  modified_base (1661483)..(1661483): a, c, g or t
  modified_base (1661988)..(1661988): a, c, g or t
  modified_base (1662288)..(1662288): a, c, g or t
  modified_base (1662311)..(1662311): a, c, g or t
  modified_base (1662314)..(1662314): a, c, g or t
  modified_base (1664614)..(1664619): a, c, g or t
  modified_base (1666467)..(1666468): a, c, g or t
  modified_base (1666470)..(1666471): a, c, g or t
  modified_base (1667256)..(1667261): a, c, g or t
  modified_base (1672967)..(1672981): a, c, g or t
  modified_base (1673534)..(1673534): a, c, g or t
  modified_base (1673910)..(1673915): a, c, g or t
  modified_base (1674155)..(1674156): a, c, g or t
  modified_base (1674159)..(1674163): a, c, g or t
  modified_base (1678223)..(1678223): a, c, g or t
  modified_base (1680368)..(1680372): a, c, g or t
  modified_base (1682789)..(1682789): a, c, g or t
  modified_base (1684081)..(1684082): a, c, g or t
  modified_base (1684828)..(1684828): a, c, g or t
  modified_base (1686204)..(1686204): a, c, g or t
  modified_base (1687519)..(1687522): a, c, g or t
  modified_base (1694098)..(1694098): a, c, g or t
  modified_base (1696033)..(1696036): a, c, g or t
  modified_base (1696983)..(1696983): a, c, g or t
  modified_base (1698134)..(1698134): a, c, g or t
  modified_base (1699235)..(1699235): a, c, g or t
  modified_base (1699977)..(1699977): a, c, g or t
  modified_base (1700496)..(1700496): a, c, g or t
  modified_base (1701791)..(1701791): a, c, g or t
  modified_base (1702584)..(1702585): a, c, g or t
  modified_base (1702618)..(1702627): a, c, g or t
  modified_base (1702851)..(1702851): a, c, g or t
  modified_base (1704291)..(1704291): a, c, g or t
  modified_base (1704362)..(1704362): a, c, g or t
  modified_base (1706668)..(1706678): a, c, g or t
  modified_base (1706736)..(1706736): a, c, g or t
  modified_base (1706738)..(1706746): a, c, g or t
  modified_base (1711851)..(1711851): a, c, g or t
  modified_base (1712545)..(1712553): a, c, g or t
  modified_base (1712557)..(1712558): a, c, g or t
  modified_base (1712564)..(1712565): a, c, g or t
  modified_base (1712786)..(1712786): a, c, g or t
  modified_base (1712869)..(1712869): a, c, g or t
  modified_base (1713084)..(1713092): a, c, g or t
  modified_base (1713235)..(1713235): a, c, g or t
  modified_base (1713238)..(1713238): a, c, g or t
  modified_base (1713312)..(1713312): a, c, g or t
  modified_base (1713371)..(1713371): a, c, g or t
  modified_base (1713383)..(1713383): a, c, g or t
  modified_base (1713661)..(1713661): a, c, g or t
  modified_base (1715714)..(1715721): a, c, g or t
  modified_base (1716638)..(1716638): a, c, g or t
  modified_base (1716658)..(1716658): a, c, g or t
  modified_base (1716763)..(1716763): a, c, g or t
  modified_base (1717096)..(1717096): a, c, g or t
  modified_base (1717152)..(1717152): a, c, g or t
  modified_base (1717301)..(1717301): a, c, g or t
  modified_base (1717336)..(1717336): a, c, g or t
  modified_base (1717437)..(1717437): a, c, g or t
  modified_base (1717443)..(1717443): a, c, g or t
  modified_base (1717464)..(1717464): a, c, g or t
  modified_base (1717504)..(1717504): a, c, g or t
  modified_base (1717522)..(1717522): a, c, g or t
  modified_base (1717576)..(1717579): a, c, g or t
  modified_base (1717596)..(1717596): a, c, g or t
  modified_base (1717600)..(1717601): a, c, g or t
  modified_base (1717811)..(1717812): a, c, g or t
  modified_base (1717820)..(1717821): a, c, g or t
  modified_base (1718221)..(1718222): a, c, g or t
  modified_base (1718615)..(1718615): a, c, g or t
  modified_base (1718890)..(1718890): a, c, g or t
  modified_base (1719017)..(1719020): a, c, g or t
  modified_base (1719137)..(1719138): a, c, g or t
  modified_base (1719149)..(1719149): a, c, g or t
  modified_base (1719229)..(1719229): a, c, g or t
  modified_base (1719325)..(1719326): a, c, g or t
  modified_base (1719389)..(1719390): a, c, g or t
  modified_base (1719392)..(1719430): a, c, g or t
  modified_base (1719515)..(1719546): a, c, g or t
  modified_base (1719621)..(1719649): a, c, g or t
  modified_base (1719652)..(1719653): a, c, g or t
  modified_base (1719677)..(1719678): a, c, g or t
  modified_base (1719703)..(1719729): a, c, g or t
  modified_base (1719734)..(1719735): a, c, g or t
  modified_base (1719783)..(1719798): a, c, g or t
  modified_base (1719803)..(1719805): a, c, g or t
  modified_base (1719822)..(1719823): a, c, g or t
  modified_base (1719830)..(1719831): a, c, g or t
  modified_base (1719834)..(1719841): a, c, g or t
  modified_base (1719934)..(1719951): a, c, g or t
  modified_base (1720082)..(1720083): a, c, g or t
  modified_base (1720210)..(1720211): a, c, g or t
  modified_base (1720213)..(1720254): a, c, g or t
  modified_base (1720466)..(1720471): a, c, g or t
  modified_base (1720473)..(1720474): a, c, g or t
  modified_base (1720486)..(1720489): a, c, g or t
  modified_base (1720501)..(1720509): a, c, g or t
  modified_base (1720513)..(1720514): a, c, g or t
  modified_base (1720576)..(1720577): a, c, g or t
  modified_base (1720652)..(1720663): a, c, g or t
  modified_base (1720666)..(1720668): a, c, g or t
  modified_base (1720670)..(1720670): a, c, g or t
  modified_base (1720836)..(1720877): a, c, g or t
  modified_base (1720916)..(1720968): a, c, g or t
  modified_base (1721021)..(1721061): a, c, g or t
  modified_base (1721082)..(1721082): a, c, g or t
  modified_base (1721099)..(1721102): a, c, g or t
  modified_base (1721140)..(1721157): a, c, g or t
  modified_base (1721162)..(1721163): a, c, g or t
  modified_base (1721184)..(1721184): a, c, g or t
  modified_base (1721202)..(1721396): a, c, g or t
  modified_base (1721420)..(1721422): a, c, g or t
  modified_base (1721426)..(1721426): a, c, g or t
  modified_base (1721428)..(1721497): a, c, g or t
  modified_base (1721540)..(1721564): a, c, g or t
  modified_base (1721575)..(1721576): a, c, g or t
  modified_base (1721602)..(1721650): a, c, g or t
  modified_base (1721654)..(1721655): a, c, g or t
  modified_base (1721669)..(1721717): a, c, g or t
  modified_base (1721758)..(1721759): a, c, g or t
  modified_base (1721763)..(1721764): a, c, g or t
  modified_base (1721767)..(1721776): a, c, g or t
  modified_base (1721784)..(1721784): a, c, g or t
  modified_base (1721786)..(1721787): a, c, g or t
  modified_base (1721807)..(1721850): a, c, g or t
  modified_base (1721876)..(1721984): a, c, g or t
  modified_base (1722068)..(1722068): a, c, g or t
  modified_base (1722079)..(1722132): a, c, g or t
  modified_base (1722145)..(1722145): a, c, g or t
  modified_base (1722154)..(1722154): a, c, g or t
  modified_base (1722156)..(1722207): a, c, g or t
  modified_base (1722219)..(1722219): a, c, g or t
  modified_base (1722244)..(1722297): a, c, g or t
  modified_base (1722326)..(1722326): a, c, g or t
  modified_base (1722329)..(1722329): a, c, g or t
  modified_base (1722410)..(1722413): a, c, g or t
  modified_base (1722458)..(1722458): a, c, g or t
  modified_base (1722478)..(1722479): a, c, g or t
  modified_base (1722481)..(1722481): a, c, g or t
  modified_base (1722484)..(1722496): a, c, g or t
  modified_base (1722618)..(1722623): a, c, g or t
  modified_base (1722710)..(1722751): a, c, g or t
  modified_base (1722899)..(1722899): a, c, g or t
  modified_base (1722905)..(1722905): a, c, g or t
  modified_base (1722907)..(1722948): a, c, g or t
  modified_base (1722963)..(1722963): a, c, g or t
  modified_base (1723400)..(1723401): a, c, g or t
  modified_base (1723403)..(1723403): a, c, g or t
  modified_base (1723405)..(1723409): a, c, g or t
  modified_base (1723438)..(1723441): a, c, g or t
  modified_base (1723585)..(1723612): a, c, g or t
  modified_base (1723615)..(1723616): a, c, g or t
  modified_base (1723649)..(1723651): a, c, g or t
  modified_base (1723844)..(1723844): a, c, g or t
  modified_base (1723850)..(1723850): a, c, g or t
  modified_base (1723853)..(1723858): a, c, g or t
  modified_base (1723886)..(1723886): a, c, g or t
  modified_base (1723973)..(1723973): a, c, g or t
  modified_base (1724027)..(1724030): a, c, g or t
  modified_base (1724057)..(1724057): a, c, g or t
  modified_base (1724060)..(1724142): a, c, g or t
  modified_base (1724167)..(1724167): a, c, g or t
  modified_base (1724184)..(1724185): a, c, g or t
  modified_base (1724190)..(1724191): a, c, g or t
  modified_base (1724193)..(1724261): a, c, g or t
  modified_base (1724263)..(1724263): a, c, g or t
  modified_base (1724271)..(1724271): a, c, g or t
  modified_base (1724292)..(1724292): a, c, g or t
  modified_base (1724305)..(1724305): a, c, g or t
  modified_base (1724383)..(1724383): a, c, g or t
  modified_base (1724482)..(1724482): a, c, g or t
  modified_base (1724568)..(1724568): a, c, g or t
  modified_base (1724574)..(1724615): a, c, g or t
  modified_base (1724674)..(1724719): a, c, g or t
  modified_base (1724733)..(1724733): a, c, g or t
  modified_base (1724745)..(1724745): a, c, g or t
  modified_base (1724748)..(1724748): a, c, g or t
  modified_base (1724970)..(1724970): a, c, g or t
  modified_base (1724996)..(1724999): a, c, g or t
  modified_base (1725006)..(1725006): a, c, g or t
  modified_base (1725142)..(1725142): a, c, g or t
  modified_base (1725155)..(1725195): a, c, g or t
  modified_base (1725300)..(1725356): a, c, g or t
  modified_base (1725360)..(1725363): a, c, g or t
  modified_base (1725532)..(1725572): a, c, g or t
  modified_base (1725593)..(1725634): a, c, g or t
  modified_base (1725642)..(1725642): a, c, g or t
  modified_base (1725647)..(1725647): a, c, g or t
  modified_base (1725676)..(1725717): a, c, g or t
  modified_base (1725797)..(1725797): a, c, g or t
  modified_base (1725998)..(1725998): a, c, g or t
  modified_base (1726013)..(1726013): a, c, g or t
  modified_base (1726016)..(1726016): a, c, g or t
  modified_base (1726124)..(1726169): a, c, g or t
  modified_base (1726214)..(1726214): a, c, g or t
  modified_base (1726231)..(1726232): a, c, g or t
  modified_base (1726234)..(1726279): a, c, g or t
  modified_base (1726281)..(1726281): a, c, g or t
  modified_base (1726326)..(1726326): a, c, g or t
  modified_base (1726332)..(1726332): a, c, g or t
  modified_base (1726365)..(1726365): a, c, g or t
  modified_base (1726419)..(1726419): a, c, g or t
  modified_base (1726461)..(1726503): a, c, g or t
  modified_base (1726525)..(1726525): a, c, g or t
  modified_base (1726539)..(1726542): a, c, g or t
  modified_base (1726579)..(1726579): a, c, g or t
  modified_base (1726594)..(1726594): a, c, g or t
  modified_base (1726596)..(1726597): a, c, g or t
  modified_base (1726669)..(1726669): a, c, g or t
  modified_base (1726686)..(1726727): a, c, g or t
  modified_base (1726780)..(1726780): a, c, g or t
  modified_base (1726843)..(1726885): a, c, g or t
  modified_base (1727024)..(1727068): a, c, g or t
  modified_base (1727076)..(1727078): a, c, g or t
  modified_base (1727123)..(1727162): a, c, g or t
  modified_base (1727188)..(1727190): a, c, g or t
  modified_base (1727192)..(1727198): a, c, g or t
  modified_base (1727997)..(1728040): a, c, g or t
  modified_base (1728092)..(1728142): a, c, g or t
  modified_base (1728345)..(1728345): a, c, g or t
  modified_base (1728352)..(1728394): a, c, g or t
  modified_base (1729055)..(1729101): a, c, g or t
  modified_base (1729106)..(1729107): a, c, g or t
  modified_base (1729118)..(1729118): a, c, g or t
  modified_base (1729125)..(1729247): a, c, g or t
  modified_base (1729334)..(1729375): a, c, g or t
  modified_base (1729400)..(1729437): a, c, g or t
  modified_base (1729457)..(1729497): a, c, g or t
  modified_base (1729627)..(1729627): a, c, g or t
  modified_base (1729871)..(1729875): a, c, g or t
  modified_base (1730030)..(1730030): a, c, g or t
  modified_base (1730039)..(1730039): a, c, g or t
  modified_base (1730041)..(1730042): a, c, g or t
  modified_base (1730046)..(1730046): a, c, g or t
  modified_base (1730393)..(1730393): a, c, g or t
  modified_base (1730396)..(1730396): a, c, g or t
  modified_base (1730403)..(1730406): a, c, g or t
  modified_base (1730509)..(1730509): a, c, g or t
  modified_base (1730973)..(1730973): a, c, g or t
  modified_base (1731592)..(1731593): a, c, g or t
  modified_base (1731985)..(1731985): a, c, g or t
  modified_base (1732375)..(1732375): a, c, g or t
  modified_base (1732378)..(1732378): a, c, g or t
  modified_base (1732544)..(1732544): a, c, g or t
  modified_base (1732570)..(1732573): a, c, g or t
  modified_base (1732581)..(1732581): a, c, g or t
  modified_base (1732913)..(1732913): a, c, g or t
  modified_base (1733050)..(1733050): a, c, g or t
  modified_base (1733063)..(1733063): a, c, g or t
  modified_base (1733084)..(1733084): a, c, g or t
  modified_base (1733088)..(1733088): a, c, g or t
  modified_base (1733189)..(1733189): a, c, g or t
  modified_base (1735459)..(1735459): a, c, g or t
  modified_base (1735585)..(1735585): a, c, g or t
  modified_base (1735712)..(1735712): a, c, g or t
  modified_base (1735895)..(1735895): a, c, g or t
  modified_base (1735940)..(1735940): a, c, g or t
  modified_base (1736132)..(1736132): a, c, g or t
  modified_base (1736158)..(1736165): a, c, g or t
  modified_base (1736263)..(1736263): a, c, g or t
  modified_base (1736303)..(1736315): a, c, g or t
  modified_base (1736352)..(1736352): a, c, g or t
  modified_base (1736547)..(1736547): a, c, g or t
  modified_base (1737058)..(1737058): a, c, g or t
  modified_base (1737133)..(1737133): a, c, g or t
  modified_base (1737178)..(1737178): a, c, g or t
  modified_base (1737189)..(1737189): a, c, g or t
  modified_base (1737201)..(1737204): a, c, g or t
  modified_base (1737314)..(1737318): a, c, g or t
  modified_base (1737330)..(1737330): a, c, g or t
  modified_base (1737452)..(1737452): a, c, g or t
  modified_base (1737497)..(1737497): a, c, g or t
  modified_base (1737831)..(1737831): a, c, g or t
  modified_base (1737875)..(1737875): a, c, g or t
  modified_base (1737894)..(1737894): a, c, g or t
  modified_base (1737935)..(1737935): a, c, g or t
  modified_base (1737956)..(1737974): a, c, g or t
  modified_base (1737992)..(1737993): a, c, g or t
  modified_base (1738001)..(1738002): a, c, g or t
  modified_base (1738006)..(1738006): a, c, g or t
  modified_base (1738071)..(1738071): a, c, g or t
  modified_base (1738083)..(1738083): a, c, g or t
  modified_base (1738125)..(1738125): a, c, g or t
  modified_base (1738138)..(1738138): a, c, g or t
  modified_base (1738156)..(1738156): a, c, g or t
  modified_base (1738194)..(1738194): a, c, g or t
  modified_base (1738281)..(1738281): a, c, g or t
  modified_base (1738370)..(1738370): a, c, g or t
  modified_base (1738376)..(1738376): a, c, g or t
  modified_base (1738441)..(1738441): a, c, g or t
  modified_base (1738462)..(1738463): a, c, g or t
  modified_base (1738465)..(1738467): a, c, g or t
  modified_base (1738528)..(1738528): a, c, g or t
  modified_base (1738543)..(1738543): a, c, g or t
  modified_base (1738596)..(1738596): a, c, g or t
  modified_base (1738686)..(1738686): a, c, g or t
  modified_base (1738698)..(1738698): a, c, g or t
  modified_base (1738726)..(1738726): a, c, g or t
  modified_base (1738780)..(1738835): a, c, g or t
  modified_base (1738863)..(1738918): a, c, g or t
  modified_base (1738922)..(1738923): a, c, g or t
  modified_base (1738927)..(1738928): a, c, g or t
  modified_base (1738964)..(1739004): a, c, g or t
  modified_base (1739026)..(1739068): a, c, g or t
  modified_base (1739070)..(1739071): a, c, g or t
  modified_base (1739090)..(1739096): a, c, g or t
  modified_base (1739126)..(1739126): a, c, g or t
  modified_base (1739181)..(1739224): a, c, g or t
  modified_base (1739233)..(1739233): a, c, g or t
  modified_base (1739280)..(1739280): a, c, g or t
  modified_base (1739283)..(1739283): a, c, g or t
  modified_base (1739322)..(1739322): a, c, g or t
  modified_base (1739364)..(1739364): a, c, g or t
  modified_base (1739484)..(1739484): a, c, g or t
  modified_base (1739488)..(1739499): a, c, g or t
  modified_base (1739507)..(1739510): a, c, g or t
  modified_base (1739553)..(1739553): a, c, g or t
  modified_base (1739610)..(1739610): a, c, g or t
  modified_base (1739613)..(1739613): a, c, g or t
  modified_base (1739628)..(1739628): a, c, g or t
  modified_base (1739633)..(1739633): a, c, g or t
  modified_base (1739661)..(1739661): a, c, g or t
  modified_base (1739757)..(1739763): a, c, g or t
  modified_base (1739812)..(1739909): a, c, g or t
  modified_base (1739934)..(1739976): a, c, g or t
  modified_base (1740136)..(1740136): a, c, g or t
  modified_base (1740187)..(1740204): a, c, g or t
  modified_base (1740238)..(1740238): a, c, g or t
  modified_base (1740343)..(1740343): a, c, g or t
  modified_base (1740410)..(1740410): a, c, g or t
  modified_base (1740413)..(1740452): a, c, g or t
  modified_base (1740454)..(1740454): a, c, g or t
  modified_base (1740599)..(1740640): a, c, g or t
  modified_base (1740661)..(1740664): a, c, g or t
  modified_base (1740735)..(1740735): a, c, g or t
  modified_base (1740756)..(1740756): a, c, g or t
  modified_base (1740761)..(1740764): a, c, g or t
  modified_base (1740766)..(1740783): a, c, g or t
  modified_base (1740865)..(1740904): a, c, g or t
  modified_base (1740907)..(1740908): a, c, g or t
  modified_base (1740987)..(1740987): a, c, g or t
  modified_base (1741043)..(1741043): a, c, g or t
  modified_base (1741048)..(1741051): a, c, g or t
  modified_base (1741060)..(1741101): a, c, g or t
  modified_base (1741147)..(1741150): a, c, g or t
  modified_base (1741157)..(1741213): a, c, g or t
  modified_base (1741240)..(1741240): a, c, g or t
  modified_base (1741254)..(1741257): a, c, g or t
  modified_base (1741262)..(1741265): a, c, g or t
  modified_base (1742333)..(1742334): a, c, g or t
  modified_base (1742457)..(1742472): a, c, g or t
  modified_base (1742479)..(1742480): a, c, g or t
  modified_base (1742515)..(1742528): a, c, g or t
  modified_base (1742535)..(1742536): a, c, g or t
  modified_base (1742543)..(1742543): a, c, g or t
  modified_base (1742548)..(1742551): a, c, g or t
  modified_base (1742782)..(1742794): a, c, g or t
  modified_base (1742816)..(1742820): a, c, g or t
  modified_base (1742921)..(1742968): a, c, g or t
  modified_base (1742986)..(1742987): a, c, g or t
  modified_base (1743043)..(1743043): a, c, g or t
  modified_base (1744467)..(1744468): a, c, g or t
  modified_base (1744503)..(1744504): a, c, g or t
  modified_base (1744509)..(1744510): a, c, g or t
  modified_base (1744545)..(1744545): a, c, g or t
  modified_base (1744550)..(1744551): a, c, g or t
  modified_base (1744590)..(1744598): a, c, g or t
  modified_base (1744750)..(1744751): a, c, g or t
  modified_base (1744759)..(1744769): a, c, g or t
  modified_base (1744778)..(1744779): a, c, g or t
  modified_base (1744934)..(1744936): a, c, g or t
  modified_base (1744965)..(1744978): a, c, g or t
  modified_base (1744985)..(1744986): a, c, g or t
  modified_base (1745043)..(1745060): a, c, g or t
  modified_base (1745084)..(1745084): a, c, g or t
  modified_base (1745133)..(1745152): a, c, g or t
  modified_base (1745440)..(1745441): a, c, g or t
  modified_base (1745512)..(1745514): a, c, g or t
  modified_base (1745516)..(1745522): a, c, g or t
  modified_base (1745524)..(1745525): a, c, g or t
  modified_base (1745561)..(1745572): a, c, g or t
  modified_base (1745923)..(1745923): a, c, g or t
  modified_base (1745942)..(1745943): a, c, g or t
  modified_base (1746578)..(1746586): a, c, g or t
  modified_base (1746591)..(1746592): a, c, g or t
  modified_base (1746607)..(1746646): a, c, g or t
  modified_base (1746662)..(1746665): a, c, g or t
  modified_base (1746668)..(1746668): a, c, g or t
  modified_base (1746670)..(1746671): a, c, g or t
  modified_base (1746683)..(1746684): a, c, g or t
  modified_base (1746693)..(1746761): a, c, g or t
  modified_base (1746763)..(1746764): a, c, g or t
  modified_base (1746767)..(1746768): a, c, g or t
  modified_base (1746772)..(1746773): a, c, g or t
  modified_base (1746844)..(1746845): a, c, g or t
  modified_base (1746849)..(1746850): a, c, g or t
  modified_base (1746905)..(1746906): a, c, g or t
  modified_base (1747030)..(1747031): a, c, g or t
  modified_base (1747042)..(1747050): a, c, g or t
  modified_base (1747205)..(1747238): a, c, g or t
  modified_base (1747329)..(1747428): a, c, g or t
  modified_base (1747470)..(1747500): a, c, g or t
  modified_base (1747524)..(1747615): a, c, g or t
  modified_base (1747641)..(1747642): a, c, g or t
  modified_base (1747667)..(1747675): a, c, g or t
  modified_base (1747699)..(1747742): a, c, g or t
  modified_base (1747764)..(1747765): a, c, g or t
  modified_base (1747777)..(1747777): a, c, g or t
  modified_base (1747792)..(1747808): a, c, g or t
  modified_base (1747832)..(1747833): a, c, g or t
  modified_base (1747857)..(1747864): a, c, g or t
  modified_base (1747866)..(1747867): a, c, g or t
  modified_base (1747897)..(1747900): a, c, g or t
  modified_base (1747904)..(1747905): a, c, g or t
  modified_base (1747944)..(1747945): a, c, g or t
  modified_base (1747947)..(1747948): a, c, g or t
  modified_base (1747954)..(1747978): a, c, g or t
  modified_base (1748023)..(1748024): a, c, g or t
  modified_base (1748027)..(1748028): a, c, g or t
  modified_base (1748065)..(1748075): a, c, g or t
  modified_base (1748077)..(1748078): a, c, g or t
  modified_base (1748087)..(1748088): a, c, g or t
  modified_base (1748124)..(1748125): a, c, g or t
  modified_base (1748128)..(1748149): a, c, g or t
  modified_base (1748194)..(1748222): a, c, g or t
  modified_base (1748226)..(1748227): a, c, g or t
  modified_base (1748233)..(1748234): a, c, g or t
  modified_base (1748281)..(1748285): a, c, g or t
  modified_base (1748302)..(1748311): a, c, g or t
  modified_base (1748353)..(1748397): a, c, g or t
  modified_base (1748417)..(1748418): a, c, g or t
  modified_base (1748420)..(1748424): a, c, g or t
  modified_base (1748447)..(1748450): a, c, g or t
  modified_base (1748452)..(1748493): a, c, g or t
  modified_base (1748516)..(1748531): a, c, g or t
  modified_base (1748543)..(1748543): a, c, g or t
  modified_base (1748551)..(1748597): a, c, g or t
  modified_base (1748609)..(1748610): a, c, g or t
  modified_base (1748617)..(1748821): a, c, g or t
  modified_base (1748841)..(1748960): a, c, g or t
  modified_base (1749006)..(1749045): a, c, g or t
  modified_base (1749065)..(1749065): a, c, g or t
  modified_base (1749073)..(1749116): a, c, g or t
  modified_base (1749129)..(1749133): a, c, g or t
  modified_base (1749139)..(1749178): a, c, g or t
  modified_base (1749238)..(1749238): a, c, g or t
  modified_base (1749262)..(1749262): a, c, g or t
  modified_base (1749292)..(1749624): a, c, g or t
  modified_base (1749626)..(1749626): a, c, g or t
  modified_base (1749638)..(1749638): a, c, g or t
  modified_base (1749647)..(1749758): a, c, g or t
  modified_base (1749779)..(1749884): a, c, g or t
  modified_base (1749899)..(1749899): a, c, g or t
  modified_base (1749902)..(1749902): a, c, g or t
  modified_base (1749914)..(1749914): a, c, g or t
  modified_base (1749953)..(1749995): a, c, g or t
  modified_base (1750018)..(1750058): a, c, g or t
  modified_base (1751114)..(1751115): a, c, g or t
  modified_base (1751120)..(1751121): a, c, g or t
  modified_base (1751871)..(1751899): a, c, g or t
  modified_base (1753723)..(1753723): a, c, g or t
  modified_base (1753823)..(1753823): a, c, g or t
  modified_base (1756231)..(1756232): a, c, g or t
  modified_base (1758435)..(1758440): a, c, g or t
  modified_base (1759960)..(1759971): a, c, g or t
  modified_base (1761443)..(1761443): a, c, g or t
  modified_base (1761504)..(1761507): a, c, g or t
  modified_base (1762415)..(1762418): a, c, g or t
  modified_base (1762496)..(1762496): a, c, g or t
  modified_base (1762548)..(1762548): a, c, g or t
  modified_base (1770520)..(1770520): a, c, g or t
  modified_base (1771506)..(1771509): a, c, g or t
  modified_base (1772684)..(1772684): a, c, g or t
  modified_base (1775665)..(1775665): a, c, g or t
  modified_base (1777211)..(1777211): a, c, g or t
  modified_base (1778448)..(1778448): a, c, g or t
  modified_base (1778474)..(1778474): a, c, g or t
  modified_base (1778708)..(1778708): a, c, g or t
  modified_base (1780570)..(1780571): a, c, g or t
  modified_base (1785668)..(1785668): a, c, g or t
  modified_base (1787149)..(1787149): a, c, g or t
  modified_base (1787153)..(1787156): a, c, g or t
  modified_base (1788861)..(1788861): a, c, g or t
  modified_base (1790320)..(1790320): a, c, g or t
  modified_base (1791784)..(1791788): a, c, g or t
  modified_base (1793265)..(1793265): a, c, g or t
  modified_base (1795305)..(1795305): a, c, g or t
  modified_base (1796078)..(1796082): a, c, g or t
  modified_base (1797138)..(1797138): a, c, g or t
  modified_base (1798179)..(1798179): a, c, g or t
  modified_base (1799564)..(1799564): a, c, g or t
  modified_base (1800663)..(1800663): a, c, g or t
  modified_base (1801061)..(1801064): a, c, g or t
  modified_base (1801384)..(1801389): a, c, g or t
  modified_base (1802481)..(1802481): a, c, g or t
  modified_base (1803077)..(1803077): a, c, g or t
  modified_base (1803299)..(1803299): a, c, g or t
  modified_base (1803504)..(1803504): a, c, g or t
  modified_base (1804236)..(1804236): a, c, g or t
  modified_base (1804263)..(1804263): a, c, g or t
  modified_base (1804949)..(1804949): a, c, g or t
  modified_base (1806612)..(1806612): a, c, g or t
  modified_base (1806798)..(1806801): a, c, g or t
  modified_base (1808311)..(1808312): a, c, g or t
  modified_base (1808649)..(1808649): a, c, g or t
  modified_base (1808693)..(1808693): a, c, g or t
  modified_base (1808844)..(1808856): a, c, g or t
  modified_base (1811152)..(1811152): a, c, g or t
  modified_base (1811613)..(1811627): a, c, g or t
  modified_base (1813382)..(1813382): a, c, g or t
  modified_base (1814805)..(1814805): a, c, g or t
  modified_base (1815824)..(1815827): a, c, g or t
  modified_base (1818434)..(1818435): a, c, g or t
  modified_base (1819630)..(1819630): a, c, g or t
  modified_base (1820185)..(1820185): a, c, g or t
  modified_base (1823073)..(1823076): a, c, g or t
  modified_base (1823155)..(1823155): a, c, g or t
  modified_base (1824453)..(1824453): a, c, g or t
  modified_base (1824515)..(1824515): a, c, g or t
  modified_base (1825126)..(1825126): a, c, g or t
  modified_base (1825417)..(1825426): a, c, g or t
  modified_base (1826311)..(1826311): a, c, g or t
  modified_base (1827543)..(1827543): a, c, g or t
  modified_base (1828933)..(1828936): a, c, g or t
  modified_base (1831571)..(1831574): a, c, g or t
  modified_base (1832122)..(1832124): a, c, g or t
  modified_base (1832838)..(1832838): a, c, g or t
  modified_base (1833855)..(1833855): a, c, g or t
  modified_base (1834035)..(1834037): a, c, g or t
  modified_base (1834064)..(1834067): a, c, g or t
  modified_base (1835485)..(1835486): a, c, g or t
  modified_base (1842814)..(1842814): a, c, g or t
  modified_base (1849436)..(1849436): a, c, g or t
  modified_base (1849546)..(1849551): a, c, g or t
  modified_base (1850015)..(1850020): a, c, g or t
  modified_base (1850343)..(1850343): a, c, g or t
  modified_base (1851329)..(1851329): a, c, g or t
  modified_base (1851379)..(1851382): a, c, g or t
  modified_base (1852962)..(1852962): a, c, g or t
  modified_base (1853342)..(1853342): a, c, g or t
  modified_base (1854049)..(1854049): a, c, g or t
  modified_base (1854929)..(1854929): a, c, g or t
  modified_base (1857199)..(1857199): a, c, g or t
  modified_base (1858480)..(1858519): a, c, g or t
  modified_base (1858943)..(1858946): a, c, g or t
  modified_base (1861350)..(1861351): a, c, g or t
  modified_base (1861375)..(1861375): a, c, g or t
  modified_base (1862258)..(1862259): a, c, g or t
  modified_base (1862263)..(1862264): a, c, g or t
  modified_base (1862271)..(1862288): a, c, g or t
  modified_base (1862967)..(1862967): a, c, g or t
  modified_base (1863018)..(1863018): a, c, g or t
  modified_base (1863029)..(1863029): a, c, g or t
  modified_base (1863233)..(1863233): a, c, g or t
  modified_base (1863405)..(1863405): a, c, g or t
  modified_base (1863519)..(1863521): a, c, g or t
  modified_base (1863549)..(1863554): a, c, g or t
  modified_base (1863559)..(1863559): a, c, g or t
  modified_base (1863587)..(1863626): a, c, g or t
  modified_base (1863719)..(1863767): a, c, g or t
  modified_base (1863851)..(1863891): a, c, g or t
  modified_base (1863915)..(1863920): a, c, g or t
  modified_base (1863932)..(1863971): a, c, g or t
  modified_base (1864060)..(1864060): a, c, g or t
  modified_base (1864156)..(1864195): a, c, g or t
  modified_base (1864223)..(1864228): a, c, g or t
  modified_base (1864234)..(1864238): a, c, g or t
  modified_base (1864269)..(1864331): a, c, g or t
  modified_base (1864341)..(1864341): a, c, g or t
  modified_base (1864405)..(1864451): a, c, g or t
  modified_base (1864473)..(1864631): a, c, g or t
  modified_base (1864655)..(1864677): a, c, g or t
  modified_base (1864692)..(1864695): a, c, g or t
  modified_base (1864701)..(1864725): a, c, g or t
  modified_base (1864752)..(1864792): a, c, g or t
  modified_base (1864795)..(1864796): a, c, g or t
  modified_base (1864921)..(1864921): a, c, g or t
  modified_base (1864927)..(1864928): a, c, g or t
  modified_base (1864933)..(1864934): a, c, g or t
  modified_base (1864970)..(1865016): a, c, g or t
  modified_base (1865028)..(1865029): a, c, g or t
  modified_base (1865040)..(1865043): a, c, g or t
  modified_base (1865066)..(1865067): a, c, g or t
  modified_base (1865093)..(1865132): a, c, g or t
  modified_base (1865170)..(1865170): a, c, g or t
  modified_base (1865172)..(1865210): a, c, g or t
  modified_base (1865298)..(1865348): a, c, g or t
  modified_base (1865398)..(1865544): a, c, g or t
  modified_base (1865567)..(1865626): a, c, g or t
  modified_base (1865641)..(1865641): a, c, g or t
  modified_base (1865652)..(1865676): a, c, g or t
  modified_base (1865704)..(1865744): a, c, g or t
  modified_base (1865769)..(1865772): a, c, g or t
  modified_base (1865794)..(1865833): a, c, g or t
  modified_base (1865845)..(1865845): a, c, g or t
  modified_base (1865900)..(1865900): a, c, g or t
  modified_base (1865917)..(1865917): a, c, g or t
  modified_base (1865929)..(1865929): a, c, g or t
  modified_base (1865938)..(1865938): a, c, g or t
  modified_base (1865985)..(1865985): a, c, g or t
  modified_base (1866030)..(1866030): a, c, g or t
  modified_base (1866035)..(1866102): a, c, g or t
  modified_base (1866167)..(1866168): a, c, g or t
  modified_base (1866171)..(1866172): a, c, g or t
  modified_base (1866178)..(1866252): a, c, g or t
  modified_base (1866271)..(1866275): a, c, g or t
  modified_base (1866282)..(1866304): a, c, g or t
  modified_base (1866333)..(1866428): a, c, g or t
  modified_base (1866449)..(1866523): a, c, g or t
  modified_base (1866540)..(1866543): a, c, g or t
  modified_base (1866639)..(1866641): a, c, g or t
  modified_base (1866693)..(1866693): a, c, g or t
  modified_base (1866712)..(1866712): a, c, g or t
  modified_base (1866742)..(1866782): a, c, g or t
  modified_base (1866785)..(1866785): a, c, g or t
  modified_base (1866839)..(1866891): a, c, g or t
  modified_base (1866937)..(1866962): a, c, g or t
  modified_base (1866964)..(1866967): a, c, g or t
  modified_base (1866998)..(1866998): a, c, g or t
  modified_base (1867000)..(1867047): a, c, g or t
  modified_base (1867071)..(1867156): a, c, g or t
  modified_base (1867173)..(1867174): a, c, g or t
  modified_base (1867179)..(1867239): a, c, g or t
  modified_base (1867255)..(1867255): a, c, g or t
  modified_base (1867263)..(1867323): a, c, g or t
  modified_base (1867347)..(1867365): a, c, g or t
  modified_base (1867370)..(1867371): a, c, g or t
  modified_base (1867399)..(1867400): a, c, g or t
  modified_base (1867403)..(1867622): a, c, g or t
  modified_base (1867649)..(1867654): a, c, g or t
  modified_base (1867680)..(1867680): a, c, g or t
  modified_base (1867682)..(1867683): a, c, g or t
  modified_base (1867736)..(1867948): a, c, g or t
  modified_base (1867972)..(1868043): a, c, g or t
  modified_base (1868067)..(1868068): a, c, g or t
  modified_base (1868100)..(1868174): a, c, g or t
  modified_base (1868186)..(1868187): a, c, g or t
  modified_base (1868204)..(1868205): a, c, g or t
  modified_base (1868211)..(1868319): a, c, g or t
  modified_base (1868342)..(1868385): a, c, g or t
  modified_base (1868407)..(1868407): a, c, g or t
  modified_base (1868433)..(1868511): a, c, g or t
  modified_base (1868532)..(1868590): a, c, g or t
  modified_base (1868635)..(1869460): a, c, g or t
  modified_base (1869494)..(1869495): a, c, g or t
  modified_base (1869500)..(1869559): a, c, g or t
  modified_base (1869581)..(1869582): a, c, g or t
  modified_base (1869586)..(1869587): a, c, g or t
  modified_base (1869590)..(1869590): a, c, g or t
  modified_base (1869596)..(1869596): a, c, g or t
  modified_base (1869606)..(1869674): a, c, g or t
  modified_base (1869979)..(1869980): a, c, g or t
  modified_base (1870059)..(1870059): a, c, g or t
  modified_base (1870073)..(1870075): a, c, g or t
  modified_base (1870077)..(1870080): a, c, g or t
  modified_base (1870083)..(1870084): a, c, g or t
  modified_base (1870266)..(1870266): a, c, g or t
  modified_base (1870554)..(1870554): a, c, g or t
  modified_base (1871221)..(1871223): a, c, g or t
  modified_base (1871566)..(1871567): a, c, g or t
  modified_base (1871574)..(1871581): a, c, g or t
  modified_base (1873259)..(1873260): a, c, g or t
  modified_base (1873264)..(1873265): a, c, g or t
  modified_base (1873611)..(1873649): a, c, g or t
  modified_base (1875372)..(1875409): a, c, g or t
  modified_base (1875462)..(1875471): a, c, g or t
  modified_base (1875587)..(1875588): a, c, g or t
  modified_base (1875676)..(1875722): a, c, g or t
  modified_base (1875801)..(1875842): a, c, g or t
  modified_base (1875864)..(1875880): a, c, g or t
  modified_base (1875904)..(1875993): a, c, g or t
  modified_base (1876020)..(1876033): a, c, g or t
  modified_base (1876035)..(1876036): a, c, g or t
  modified_base (1876044)..(1876045): a, c, g or t
  modified_base (1876057)..(1876061): a, c, g or t
  modified_base (1876092)..(1876095): a, c, g or t
  modified_base (1876107)..(1876108): a, c, g or t
  modified_base (1876121)..(1876122): a, c, g or t
  modified_base (1876125)..(1876126): a, c, g or t
  modified_base (1876128)..(1876129): a, c, g or t
  modified_base (1876197)..(1876237): a, c, g or t
  modified_base (1876325)..(1876328): a, c, g or t
  modified_base (1876330)..(1876331): a, c, g or t
  modified_base (1876355)..(1876359): a, c, g or t
  modified_base (1876430)..(1876431): a, c, g or t
  modified_base (1876443)..(1876474): a, c, g or t
  modified_base (1876630)..(1876648): a, c, g or t
  modified_base (1876702)..(1876702): a, c, g or t
  modified_base (1876737)..(1876738): a, c, g or t
  modified_base (1876744)..(1876750): a, c, g or t
  modified_base (1876753)..(1876757): a, c, g or t
  modified_base (1876759)..(1876760): a, c, g or t
  modified_base (1876771)..(1876817): a, c, g or t
  modified_base (1876853)..(1876874): a, c, g or t
  modified_base (1876935)..(1876936): a, c, g or t
  modified_base (1876938)..(1876939): a, c, g or t
  modified_base (1876951)..(1876980): a, c, g or t
  modified_base (1876991)..(1876992): a, c, g or t
  modified_base (1877018)..(1877018): a, c, g or t
  modified_base (1877034)..(1877035): a, c, g or t
  modified_base (1877042)..(1877042): a, c, g or t
  modified_base (1877049)..(1877050): a, c, g or t
  modified_base (1877052)..(1877070): a, c, g or t
  modified_base (1877091)..(1877092): a, c, g or t
  modified_base (1877094)..(1877113): a, c, g or t
  modified_base (1877129)..(1877130): a, c, g or t
  modified_base (1877134)..(1877135): a, c, g or t
  modified_base (1877137)..(1877161): a, c, g or t
  modified_base (1877172)..(1877173): a, c, g or t
  modified_base (1877186)..(1877186): a, c, g or t
  modified_base (1877266)..(1877269): a, c, g or t
  modified_base (1877319)..(1877320): a, c, g or t
  modified_base (1877332)..(1877333): a, c, g or t
  modified_base (1877393)..(1877409): a, c, g or t
  modified_base (1877412)..(1877415): a, c, g or t
  modified_base (1877441)..(1877467): a, c, g or t
  modified_base (1877762)..(1877763): a, c, g or t
  modified_base (1877869)..(1877878): a, c, g or t
  modified_base (1877881)..(1877882): a, c, g or t
  modified_base (1877894)..(1877895): a, c, g or t
  modified_base (1877927)..(1877928): a, c, g or t
  modified_base (1877992)..(1877993): a, c, g or t
  modified_base (1878044)..(1878045): a, c, g or t
  modified_base (1878047)..(1878085): a, c, g or t
  modified_base (1878096)..(1878097): a, c, g or t
  modified_base (1878109)..(1878120): a, c, g or t
  modified_base (1878129)..(1878130): a, c, g or t
  modified_base (1878136)..(1878137): a, c, g or t
  modified_base (1878146)..(1878179): a, c, g or t
  modified_base (1878325)..(1878326): a, c, g or t
  modified_base (1878328)..(1878338): a, c, g or t
  modified_base (1878341)..(1878342): a, c, g or t
  modified_base (1878366)..(1878411): a, c, g or t
  modified_base (1878428)..(1878429): a, c, g or t
  modified_base (1878436)..(1878437): a, c, g or t
  modified_base (1878439)..(1878440): a, c, g or t
  modified_base (1878444)..(1878445): a, c, g or t
  modified_base (1878502)..(1878517): a, c, g or t
  modified_base (1878541)..(1878554): a, c, g or t
  modified_base (1878582)..(1878689): a, c, g or t
  modified_base (1878693)..(1878694): a, c, g or t
  modified_base (1878713)..(1878724): a, c, g or t
  modified_base (1878727)..(1878727): a, c, g or t
  modified_base (1878790)..(1878795): a, c, g or t
  modified_base (1878874)..(1878874): a, c, g or t
  modified_base (1878917)..(1878917): a, c, g or t
  modified_base (1879077)..(1879087): a, c, g or t
  modified_base (1879097)..(1879098): a, c, g or t
  modified_base (1879185)..(1879189): a, c, g or t
  modified_base (1879253)..(1879253): a, c, g or t
  modified_base (1879350)..(1879376): a, c, g or t
  modified_base (1879459)..(1879460): a, c, g or t
  modified_base (1879560)..(1879572): a, c, g or t
  modified_base (1879577)..(1879579): a, c, g or t
  modified_base (1879596)..(1879599): a, c, g or t
  modified_base (1879729)..(1879748): a, c, g or t
  modified_base (1879861)..(1879861): a, c, g or t
  modified_base (1879931)..(1879995): a, c, g or t
  modified_base (1880040)..(1880085): a, c, g or t
  modified_base (1880161)..(1880161): a, c, g or t
  modified_base (1880193)..(1880235): a, c, g or t
  modified_base (1880362)..(1880429): a, c, g or t
  modified_base (1880558)..(1880620): a, c, g or t
  modified_base (1880638)..(1880638): a, c, g or t
  modified_base (1880646)..(1880649): a, c, g or t
  modified_base (1880691)..(1880730): a, c, g or t
  modified_base (1880755)..(1880757): a, c, g or t
  modified_base (1880787)..(1880788): a, c, g or t
  modified_base (1880805)..(1880805): a, c, g or t
  modified_base (1880809)..(1880810): a, c, g or t
  modified_base (1880812)..(1880913): a, c, g or t
  modified_base (1880939)..(1880991): a, c, g or t
  modified_base (1880994)..(1880995): a, c, g or t
  modified_base (1881020)..(1881020): a, c, g or t
  modified_base (1881106)..(1881107): a, c, g or t
  modified_base (1881111)..(1881114): a, c, g or t
  modified_base (1881117)..(1881118): a, c, g or t
  modified_base (1881121)..(1881148): a, c, g or t
  modified_base (1881152)..(1881152): a, c, g or t
  modified_base (1881182)..(1881194): a, c, g or t
  modified_base (1881246)..(1881252): a, c, g or t
  modified_base (1881300)..(1881353): a, c, g or t
  modified_base (1881379)..(1881380): a, c, g or t
  modified_base (1881383)..(1881482): a, c, g or t
  modified_base (1881531)..(1881569): a, c, g or t
  modified_base (1881587)..(1881588): a, c, g or t
  modified_base (1881615)..(1881617): a, c, g or t
  modified_base (1881650)..(1881693): a, c, g or t
  modified_base (1881695)..(1881700): a, c, g or t
  modified_base (1881755)..(1881800): a, c, g or t
  modified_base (1881811)..(1881811): a, c, g or t
  modified_base (1881823)..(1881823): a, c, g or t
  modified_base (1881832)..(1881852): a, c, g or t
  modified_base (1881862)..(1881862): a, c, g or t
  modified_base (1881903)..(1881908): a, c, g or t
  modified_base (1881916)..(1881916): a, c, g or t
  modified_base (1881937)..(1881939): a, c, g or t
  modified_base (1882020)..(1882023): a, c, g or t
  modified_base (1882047)..(1882050): a, c, g or t
  modified_base (1882141)..(1882161): a, c, g or t
  modified_base (1882267)..(1882320): a, c, g or t
  modified_base (1882326)..(1882327): a, c, g or t
  modified_base (1882331)..(1882334): a, c, g or t
  modified_base (1882336)..(1882339): a, c, g or t
  modified_base (1882341)..(1882342): a, c, g or t
  modified_base (1882344)..(1882393): a, c, g or t
  modified_base (1882418)..(1882467): a, c, g or t
  modified_base (1882522)..(1882524): a, c, g or t
  modified_base (1882548)..(1882548): a, c, g or t
  modified_base (1882558)..(1882578): a, c, g or t
  modified_base (1882585)..(1882588): a, c, g or t
  modified_base (1882602)..(1882624): a, c, g or t
  modified_base (1882649)..(1882652): a, c, g or t
  modified_base (1882654)..(1882654): a, c, g or t
  modified_base (1882692)..(1882692): a, c, g or t
  modified_base (1882698)..(1882698): a, c, g or t
  modified_base (1882740)..(1882740): a, c, g or t
  modified_base (1882764)..(1882764): a, c, g or t
  modified_base (1882768)..(1882831): a, c, g or t
  modified_base (1882834)..(1882834): a, c, g or t
  modified_base (1882877)..(1882882): a, c, g or t
  modified_base (1882885)..(1882886): a, c, g or t
  modified_base (1882944)..(1882985): a, c, g or t
  modified_base (1883032)..(1883077): a, c, g or t
  modified_base (1883108)..(1883108): a, c, g or t
  modified_base (1883110)..(1883160): a, c, g or t
  modified_base (1883203)..(1883204): a, c, g or t
  modified_base (1883230)..(1883265): a, c, g or t
  modified_base (1883332)..(1883359): a, c, g or t
  modified_base (1883383)..(1883448): a, c, g or t
  modified_base (1883450)..(1883451): a, c, g or t
  modified_base (1883455)..(1883456): a, c, g or t
  modified_base (1883475)..(1883475): a, c, g or t
  modified_base (1883509)..(1883512): a, c, g or t
  modified_base (1883526)..(1883527): a, c, g or t
  modified_base (1883533)..(1883601): a, c, g or t
  modified_base (1883619)..(1883619): a, c, g or t
  modified_base (1883622)..(1883622): a, c, g or t
  modified_base (1883624)..(1883668): a, c, g or t
  modified_base (1883694)..(1883717): a, c, g or t
  modified_base (1883720)..(1883721): a, c, g or t
  modified_base (1883733)..(1883734): a, c, g or t
  modified_base (1883741)..(1883742): a, c, g or t
  modified_base (1883758)..(1883825): a, c, g or t
  modified_base (1883859)..(1883860): a, c, g or t
  modified_base (1883871)..(1883888): a, c, g or t
  modified_base (1883922)..(1883923): a, c, g or t
  modified_base (1883929)..(1883971): a, c, g or t
  modified_base (1884060)..(1884061): a, c, g or t
  modified_base (1884067)..(1884118): a, c, g or t
  modified_base (1884150)..(1884254): a, c, g or t
  modified_base (1884301)..(1884302): a, c, g or t
  modified_base (1884312)..(1884313): a, c, g or t
  modified_base (1884338)..(1884342): a, c, g or t
  modified_base (1884448)..(1884510): a, c, g or t
  modified_base (1884512)..(1884513): a, c, g or t
  modified_base (1884530)..(1884545): a, c, g or t
  modified_base (1884549)..(1884551): a, c, g or t
  modified_base (1884645)..(1884754): a, c, g or t
  modified_base (1884756)..(1884756): a, c, g or t
  modified_base (1884776)..(1885045): a, c, g or t
  modified_base (1885049)..(1885050): a, c, g or t
  modified_base (1885072)..(1885084): a, c, g or t
  modified_base (1885124)..(1885174): a, c, g or t
  modified_base (1885197)..(1885213): a, c, g or t
  modified_base (1885235)..(1885236): a, c, g or t
  modified_base (1885238)..(1885242): a, c, g or t
  modified_base (1885256)..(1885257): a, c, g or t
  modified_base (1885261)..(1885262): a, c, g or t
  modified_base (1885266)..(1885328): a, c, g or t
  modified_base (1885358)..(1885461): a, c, g or t
  modified_base (1885485)..(1885504): a, c, g or t
  modified_base (1885543)..(1885544): a, c, g or t
  modified_base (1885547)..(1885548): a, c, g or t
  modified_base (1885560)..(1885609): a, c, g or t
  modified_base (1885634)..(1885677): a, c, g or t
  modified_base (1885842)..(1885843): a, c, g or t
  modified_base (1886801)..(1886803): a, c, g or t
  modified_base (1886806)..(1886807): a, c, g or t
  modified_base (1886827)..(1886830): a, c, g or t
  modified_base (1887490)..(1887491): a, c, g or t
  modified_base (1887690)..(1887691): a, c, g or t
  modified_base (1888862)..(1888863): a, c, g or t
  modified_base (1888869)..(1888875): a, c, g or t
  modified_base (1888877)..(1888878): a, c, g or t
  modified_base (1892916)..(1892916): a, c, g or t
  modified_base (1892987)..(1892988): a, c, g or t
  modified_base (1893061)..(1893067): a, c, g or t
  modified_base (1893966)..(1893966): a, c, g or t
  modified_base (1894832)..(1894833): a, c, g or t
  modified_base (1895610)..(1895610): a, c, g or t
  modified_base (1896471)..(1896472): a, c, g or t
  modified_base (1896474)..(1896475): a, c, g or t
  modified_base (1896745)..(1896746): a, c, g or t
  modified_base (1896815)..(1896816): a, c, g or t
  modified_base (1898355)..(1898355): a, c, g or t
  modified_base (1898419)..(1898420): a, c, g or t
  modified_base (1898479)..(1898510): a, c, g or t
  modified_base (1898514)..(1898514): a, c, g or t
  modified_base (1898523)..(1898523): a, c, g or t
  modified_base (1898578)..(1898578): a, c, g or t
  modified_base (1898713)..(1898713): a, c, g or t
  modified_base (1898747)..(1898747): a, c, g or t
  modified_base (1898772)..(1898813): a, c, g or t
  modified_base (1898817)..(1898817): a, c, g or t
  modified_base (1898870)..(1898915): a, c, g or t
  modified_base (1898940)..(1898943): a, c, g or t
  modified_base (1898962)..(1898963): a, c, g or t
  modified_base (1898965)..(1899004): a, c, g or t
  modified_base (1899140)..(1899141): a, c, g or t
  modified_base (1899145)..(1899200): a, c, g or t
  modified_base (1899458)..(1899500): a, c, g or t
  modified_base (1899560)..(1899562): a, c, g or t
  modified_base (1899564)..(1899606): a, c, g or t
  modified_base (1899651)..(1899705): a, c, g or t
  modified_base (1899737)..(1899737): a, c, g or t
  modified_base (1899740)..(1899740): a, c, g or t
  modified_base (1899746)..(1899746): a, c, g or t
  modified_base (1899748)..(1899788): a, c, g or t
  modified_base (1899790)..(1899791): a, c, g or t
  modified_base (1899813)..(1899853): a, c, g or t
  modified_base (1899855)..(1899856): a, c, g or t
  modified_base (1899894)..(1899898): a, c, g or t
  modified_base (1899901)..(1899956): a, c, g or t
  modified_base (1899980)..(1900019): a, c, g or t
  modified_base (1900046)..(1900091): a, c, g or t
  modified_base (1900146)..(1900146): a, c, g or t
  modified_base (1900154)..(1900156): a, c, g or t
  modified_base (1900162)..(1900162): a, c, g or t
  modified_base (1900197)..(1900197): a, c, g or t
  modified_base (1900223)..(1900223): a, c, g or t
  modified_base (1900288)..(1900297): a, c, g or t
  modified_base (1900347)..(1900350): a, c, g or t
  modified_base (1900420)..(1900462): a, c, g or t
  modified_base (1900569)..(1900569): a, c, g or t
  modified_base (1900620)..(1900621): a, c, g or t
  modified_base (1900686)..(1900687): a, c, g or t
  modified_base (1900691)..(1900691): a, c, g or t
  modified_base (1900695)..(1900696): a, c, g or t
  modified_base (1900707)..(1900707): a, c, g or t
  modified_base (1900759)..(1900760): a, c, g or t
  modified_base (1900762)..(1900805): a, c, g or t
  modified_base (1900807)..(1900808): a, c, g or t
  modified_base (1900836)..(1900837): a, c, g or t
  modified_base (1900891)..(1900891): a, c, g or t
  modified_base (1900893)..(1900947): a, c, g or t
  modified_base (1901012)..(1901057): a, c, g or t
  modified_base (1901090)..(1901156): a, c, g or t
  modified_base (1901216)..(1901259): a, c, g or t
  modified_base (1901267)..(1901268): a, c, g or t
  modified_base (1901276)..(1901277): a, c, g or t
  modified_base (1901301)..(1901346): a, c, g or t
  modified_base (1901350)..(1901351): a, c, g or t
  modified_base (1901357)..(1901358): a, c, g or t
  modified_base (1901388)..(1901388): a, c, g or t
  modified_base (1901475)..(1901478): a, c, g or t
  modified_base (1901481)..(1901527): a, c, g or t
  modified_base (1901546)..(1901583): a, c, g or t
  modified_base (1901604)..(1901655): a, c, g or t
  modified_base (1901683)..(1901690): a, c, g or t
  modified_base (1901698)..(1901698): a, c, g or t
  modified_base (1901714)..(1901731): a, c, g or t
  modified_base (1901771)..(1901772): a, c, g or t
  modified_base (1901776)..(1901776): a, c, g or t
  modified_base (1901783)..(1901825): a, c, g or t
  modified_base (1901846)..(1901861): a, c, g or t
  modified_base (1901892)..(1901950): a, c, g or t
  modified_base (1901986)..(1901987): a, c, g or t
  modified_base (1901989)..(1901990): a, c, g or t
  modified_base (1901994)..(1901995): a, c, g or t
  modified_base (1901997)..(1902011): a, c, g or t
  modified_base (1902042)..(1902043): a, c, g or t
  modified_base (1902059)..(1902060): a, c, g or t
  modified_base (1902064)..(1902086): a, c, g or t
  modified_base (1902109)..(1902114): a, c, g or t
  modified_base (1902139)..(1902152): a, c, g or t
  modified_base (1902186)..(1902186): a, c, g or t
  modified_base (1902189)..(1902192): a, c, g or t
  modified_base (1902226)..(1902227): a, c, g or t
  modified_base (1902267)..(1902270): a, c, g or t
  modified_base (1902274)..(1902276): a, c, g or t
  modified_base (1902299)..(1902338): a, c, g or t
  modified_base (1902363)..(1902363): a, c, g or t
  modified_base (1902372)..(1902382): a, c, g or t
  modified_base (1902423)..(1902485): a, c, g or t
  modified_base (1902639)..(1902727): a, c, g or t
  modified_base (1902729)..(1902732): a, c, g or t
  modified_base (1902752)..(1902752): a, c, g or t
  modified_base (1902758)..(1903198): a, c, g or t
  modified_base (1903206)..(1903206): a, c, g or t
  modified_base (1903216)..(1903217): a, c, g or t
  modified_base (1903222)..(1903238): a, c, g or t
  modified_base (1903249)..(1903249): a, c, g or t
  modified_base (1903275)..(1903342): a, c, g or t
  modified_base (1903376)..(1903382): a, c, g or t
  modified_base (1903413)..(1903425): a, c, g or t
  modified_base (1903436)..(1903437): a, c, g or t
  modified_base (1903469)..(1903470): a, c, g or t
  modified_base (1903474)..(1903477): a, c, g or t
  modified_base (1903501)..(1903545): a, c, g or t
  modified_base (1903558)..(1903559): a, c, g or t
  modified_base (1903563)..(1903564): a, c, g or t
  modified_base (1903569)..(1903587): a, c, g or t
  modified_base (1903617)..(1903618): a, c, g or t
  modified_base (1903622)..(1903694): a, c, g or t
  modified_base (1903703)..(1903703): a, c, g or t
  modified_base (1903723)..(1903929): a, c, g or t
  modified_base (1903967)..(1904008): a, c, g or t
  modified_base (1904029)..(1904066): a, c, g or t
  modified_base (1904103)..(1904106): a, c, g or t
  modified_base (1904112)..(1904128): a, c, g or t
  modified_base (1904131)..(1904133): a, c, g or t
  modified_base (1904138)..(1904139): a, c, g or t
  modified_base (1904152)..(1904194): a, c, g or t
  modified_base (1904234)..(1904238): a, c, g or t
  modified_base (1904257)..(1904257): a, c, g or t
  modified_base (1904259)..(1905326): a, c, g or t
  modified_base (1905360)..(1905950): a, c, g or t
  modified_base (1905965)..(1905965): a, c, g or t
  modified_base (1905969)..(1905971): a, c, g or t
  modified_base (1905974)..(1906386): a, c, g or t
  modified_base (1906389)..(1906390): a, c, g or t
  modified_base (1906410)..(1906625): a, c, g or t
  modified_base (1906648)..(1906687): a, c, g or t
  modified_base (1906689)..(1906690): a, c, g or t
  modified_base (1906714)..(1906755): a, c, g or t
  modified_base (1906841)..(1906938): a, c, g or t
  modified_base (1906976)..(1907024): a, c, g or t
  modified_base (1907966)..(1907966): a, c, g or t
  modified_base (1907968)..(1907969): a, c, g or t
  modified_base (1908152)..(1908156): a, c, g or t
  modified_base (1908288)..(1908556): a, c, g or t
  modified_base (1908583)..(1908638): a, c, g or t
  modified_base (1908709)..(1908722): a, c, g or t
  modified_base (1908772)..(1908773): a, c, g or t
  modified_base (1908847)..(1908893): a, c, g or t
  modified_base (1910200)..(1910200): a, c, g or t
  modified_base (1910202)..(1910203): a, c, g or t
  modified_base (1910207)..(1910207): a, c, g or t
  modified_base (1910435)..(1910436): a, c, g or t
  modified_base (1910440)..(1910441): a, c, g or t
  modified_base (1910443)..(1910448): a, c, g or t
  modified_base (1910519)..(1910519): a, c, g or t
  modified_base (1910653)..(1910653): a, c, g or t
  modified_base (1910870)..(1910870): a, c, g or t
  modified_base (1910877)..(1910878): a, c, g or t
  modified_base (1911157)..(1911157): a, c, g or t
  modified_base (1911212)..(1911212): a, c, g or t
  modified_base (1911219)..(1911219): a, c, g or t
  modified_base (1911426)..(1911478): a, c, g or t
  modified_base (1911540)..(1911542): a, c, g or t
  modified_base (1911547)..(1911579): a, c, g or t
  modified_base (1911582)..(1911583): a, c, g or t
  modified_base (1911635)..(1911651): a, c, g or t
  modified_base (1911657)..(1911657): a, c, g or t
  modified_base (1911677)..(1911678): a, c, g or t
  modified_base (1911682)..(1911691): a, c, g or t
  modified_base (1911711)..(1911711): a, c, g or t
  modified_base (1911796)..(1911796): a, c, g or t
  modified_base (1911798)..(1911835): a, c, g or t
  modified_base (1911864)..(1911864): a, c, g or t
  modified_base (1911874)..(1911913): a, c, g or t
  modified_base (1912005)..(1912005): a, c, g or t
  modified_base (1912023)..(1912023): a, c, g or t
  modified_base (1912032)..(1912050): a, c, g or t
  modified_base (1912065)..(1912065): a, c, g or t
  modified_base (1912316)..(1912355): a, c, g or t
  modified_base (1912581)..(1912633): a, c, g or t
  modified_base (1912658)..(1912666): a, c, g or t
  modified_base (1912713)..(1912713): a, c, g or t
  modified_base (1912965)..(1912972): a, c, g or t
  modified_base (1912981)..(1912982): a, c, g or t
  modified_base (1912984)..(1912985): a, c, g or t
  modified_base (1913019)..(1913153): a, c, g or t
  modified_base (1913205)..(1913208): a, c, g or t
  modified_base (1913211)..(1913216): a, c, g or t
  modified_base (1913224)..(1913224): a, c, g or t
  modified_base (1913233)..(1913233): a, c, g or t
  modified_base (1913240)..(1913335): a, c, g or t
  modified_base (1913381)..(1913381): a, c, g or t
  modified_base (1913384)..(1913384): a, c, g or t
  modified_base (1913402)..(1913402): a, c, g or t
  modified_base (1913408)..(1913408): a, c, g or t
  modified_base (1913413)..(1913416): a, c, g or t
  modified_base (1913643)..(1913651): a, c, g or t
  modified_base (1913712)..(1913714): a, c, g or t
  modified_base (1913729)..(1913732): a, c, g or t
  modified_base (1913752)..(1913754): a, c, g or t
  modified_base (1913760)..(1913824): a, c, g or t
  modified_base (1913826)..(1913827): a, c, g or t
  modified_base (1913831)..(1913832): a, c, g or t
  modified_base (1913836)..(1913837): a, c, g or t
  modified_base (1913848)..(1914118): a, c, g or t
  modified_base (1914147)..(1914148): a, c, g or t
  modified_base (1914150)..(1914150): a, c, g or t
  modified_base (1914155)..(1914212): a, c, g or t
  modified_base (1914216)..(1914217): a, c, g or t
  modified_base (1914262)..(1914306): a, c, g or t
  modified_base (1914370)..(1914412): a, c, g or t
  modified_base (1914549)..(1914580): a, c, g or t
  modified_base (1914582)..(1914588): a, c, g or t
  modified_base (1914685)..(1914724): a, c, g or t
  modified_base (1914765)..(1914808): a, c, g or t
  modified_base (1914905)..(1914955): a, c, g or t
  modified_base (1915027)..(1915027): a, c, g or t
  modified_base (1915044)..(1915097): a, c, g or t
  modified_base (1915122)..(1915122): a, c, g or t
  modified_base (1915131)..(1915193): a, c, g or t
  modified_base (1915249)..(1915249): a, c, g or t
  modified_base (1915257)..(1915257): a, c, g or t
  modified_base (1915271)..(1915272): a, c, g or t
  modified_base (1915274)..(1915275): a, c, g or t
  modified_base (1915314)..(1915314): a, c, g or t
  modified_base (1915326)..(1915326): a, c, g or t
  modified_base (1915336)..(1915395): a, c, g or t
  modified_base (1915571)..(1915610): a, c, g or t
  modified_base (1915668)..(1915671): a, c, g or t
  modified_base (1916391)..(1916393): a, c, g or t
  modified_base (1916741)..(1916744): a, c, g or t
  modified_base (1916800)..(1916803): a, c, g or t
  modified_base (1916807)..(1916812): a, c, g or t
  modified_base (1918374)..(1918396): a, c, g or t
  modified_base (1919970)..(1919970): a, c, g or t
  modified_base (1922079)..(1922079): a, c, g or t
  modified_base (1922773)..(1922773): a, c, g or t
  modified_base (1923278)..(1923278): a, c, g or t
  modified_base (1923294)..(1923294): a, c, g or t
  modified_base (1923688)..(1923691): a, c, g or t
  modified_base (1923693)..(1923693): a, c, g or t
  modified_base (1925034)..(1925034): a, c, g or t
  modified_base (1925158)..(1925158): a, c, g or t
  modified_base (1925509)..(1925509): a, c, g or t
  modified_base (1925519)..(1925519): a, c, g or t
  modified_base (1926135)..(1926135): a, c, g or t
  modified_base (1930797)..(1930797): a, c, g or t
  modified_base (1932065)..(1932065): a, c, g or t
  modified_base (1932069)..(1932069): a, c, g or t
  modified_base (1933146)..(1933146): a, c, g or t
  modified_base (1933894)..(1933897): a, c, g or t
  modified_base (1934142)..(1934142): a, c, g or t
  modified_base (1934929)..(1934929): a, c, g or t
  modified_base (1939745)..(1939745): a, c, g or t
  modified_base (1940003)..(1940003): a, c, g or t
  modified_base (1944609)..(1944612): a, c, g or t
  modified_base (1945791)..(1945791): a, c, g or t
  modified_base (1948308)..(1948308): a, c, g or t
  modified_base (1949533)..(1949542): a, c, g or t
  modified_base (1955568)..(1955571): a, c, g or t
  modified_base (1955740)..(1955740): a, c, g or t
  modified_base (1957359)..(1957360): a, c, g or t
  modified_base (1957781)..(1957781): a, c, g or t
  modified_base (1959244)..(1959244): a, c, g or t
  modified_base (1959979)..(1959979): a, c, g or t
  modified_base (1960483)..(1960483): a, c, g or t
  modified_base (1962389)..(1962393): a, c, g or t
  modified_base (1964609)..(1964620): a, c, g or t
  modified_base (1965941)..(1965949): a, c, g or t
  modified_base (1966522)..(1966522): a, c, g or t
  modified_base (1966535)..(1966535): a, c, g or t
  modified_base (1966575)..(1966575): a, c, g or t
  modified_base (1967687)..(1967687): a, c, g or t
  modified_base (1968902)..(1968902): a, c, g or t
  modified_base (1968982)..(1968983): a, c, g or t
  modified_base (1968988)..(1969035): a, c, g or t
  modified_base (1969044)..(1969045): a, c, g or t
  modified_base (1969061)..(1969061): a, c, g or t
  modified_base (1971407)..(1971415): a, c, g or t
  modified_base (1972009)..(1972009): a, c, g or t
  modified_base (1976023)..(1976023): a, c, g or t
  modified_base (1976368)..(1976368): a, c, g or t
  modified_base (1977460)..(1977463): a, c, g or t
  modified_base (1979314)..(1979314): a, c, g or t
  modified_base (1980140)..(1980140): a, c, g or t
  modified_base (1981161)..(1981161): a, c, g or t
  modified_base (1981167)..(1981167): a, c, g or t
  modified_base (1981171)..(1981172): a, c, g or t
  modified_base (1983043)..(1983050): a, c, g or t
  modified_base (1986727)..(1986727): a, c, g or t
  modified_base (1986911)..(1986911): a, c, g or t
  modified_base (1988760)..(1988765): a, c, g or t
  modified_base (1989803)..(1989806): a, c, g or t
  modified_base (1990709)..(1990712): a, c, g or t
  modified_base (1991331)..(1991336): a, c, g or t
  modified_base (1991518)..(1991518): a, c, g or t
  modified_base (1991650)..(1991665): a, c, g or t
  modified_base (1999423)..(1999423): a, c, g or t
  modified_base (2000437)..(2000437): a, c, g or t
  modified_base (2002908)..(2002908): a, c, g or t
  modified_base (2003541)..(2003552): a, c, g or t
  modified_base (2004758)..(2004758): a, c, g or t
  modified_base (2009811)..(2009811): a, c, g or t
  modified_base (2010088)..(2010088): a, c, g or t
  modified_base (2013727)..(2013728): a, c, g or t
  modified_base (2013730)..(2013737): a, c, g or t
  modified_base (2014997)..(2015005): a, c, g or t
  modified_base (2015013)..(2015014): a, c, g or t
  modified_base (2018574)..(2018574): a, c, g or t
  modified_base (2018659)..(2018659): a, c, g or t
  modified_base (2018867)..(2018867): a, c, g or t
  modified_base (2023451)..(2023451): a, c, g or t
  modified_base (2024979)..(2024979): a, c, g or t
  modified_base (2026344)..(2026344): a, c, g or t
  modified_base (2026715)..(2026718): a, c, g or t
  modified_base (2029903)..(2029903): a, c, g or t
  modified_base (2029905)..(2029905): a, c, g or t
  modified_base (2029907)..(2029910): a, c, g or t
  modified_base (2032385)..(2032388): a, c, g or t
  modified_base (2035316)..(2035316): a, c, g or t
  modified_base (2037024)..(2037024): a, c, g or t
  modified_base (2038331)..(2038331): a, c, g or t
  modified_base (2038434)..(2038437): a, c, g or t
  modified_base (2038920)..(2038928): a, c, g or t
  modified_base (2039676)..(2039677): a, c, g or t
  modified_base (2039684)..(2039684): a, c, g or t
  modified_base (2044254)..(2044254): a, c, g or t
  modified_base (2046544)..(2046544): a, c, g or t
  modified_base (2048030)..(2048030): a, c, g or t
  modified_base (2048032)..(2048033): a, c, g or t
  modified_base (2051293)..(2051293): a, c, g or t
  modified_base (2052035)..(2052035): a, c, g or t
  modified_base (2055437)..(2055437): a, c, g or t
  modified_base (2055458)..(2055458): a, c, g or t
  modified_base (2055831)..(2055831): a, c, g or t
  modified_base (2059352)..(2059352): a, c, g or t
  modified_base (2059907)..(2059907): a, c, g or t
  modified_base (2059910)..(2059910): a, c, g or t
  modified_base (2060096)..(2060096): a, c, g or t
  modified_base (2062080)..(2062084): a, c, g or t
  modified_base (2063403)..(2063403): a, c, g or t
  modified_base (2063973)..(2063973): a, c, g or t
  modified_base (2064779)..(2064779): a, c, g or t
  modified_base (2066138)..(2066138): a, c, g or t
  modified_base (2066468)..(2066476): a, c, g or t
  modified_base (2066478)..(2066478): a, c, g or t
  modified_base (2067699)..(2067699): a, c, g or t
  modified_base (2067719)..(2067719): a, c, g or t
  modified_base (2068557)..(2068557): a, c, g or t
  modified_base (2068560)..(2068560): a, c, g or t
  modified_base (2069151)..(2069151): a, c, g or t
  modified_base (2071494)..(2071494): a, c, g or t
  modified_base (2073284)..(2073284): a, c, g or t
  modified_base (2073355)..(2073358): a, c, g or t
  modified_base (2075930)..(2075930): a, c, g or t
  modified_base (2076369)..(2076369): a, c, g or t
  modified_base (2081054)..(2081054): a, c, g or t
  modified_base (2081251)..(2081251): a, c, g or t
  modified_base (2082102)..(2082102): a, c, g or t
  modified_base (2083340)..(2083341): a, c, g or t
  modified_base (2084084)..(2084084): a, c, g or t
  modified_base (2084149)..(2084149): a, c, g or t
  modified_base (2084342)..(2084342): a, c, g or t
  modified_base (2084606)..(2084606): a, c, g or t
  modified_base (2086932)..(2086932): a, c, g or t
  modified_base (2086942)..(2086942): a, c, g or t
  modified_base (2087806)..(2087811): a, c, g or t
  modified_base (2088359)..(2088359): a, c, g or t
  modified_base (2089458)..(2089458): a, c, g or t
  modified_base (2089587)..(2089587): a, c, g or t
  modified_base (2090696)..(2090700): a, c, g or t
  modified_base (2090742)..(2090742): a, c, g or t
  modified_base (2091649)..(2091649): a, c, g or t
  modified_base (2094334)..(2094334): a, c, g or t
  modified_base (2095507)..(2095507): a, c, g or t
  modified_base (2095578)..(2095578): a, c, g or t
  modified_base (2096591)..(2096591): a, c, g or t
  modified_base (2096709)..(2096712): a, c, g or t
  modified_base (2096890)..(2096891): a, c, g or t
  modified_base (2096893)..(2096903): a, c, g or t
  modified_base (2096908)..(2096908): a, c, g or t
  modified_base (2097012)..(2097012): a, c, g or t
  modified_base (2101172)..(2101172): a, c, g or t
  modified_base (2103737)..(2103737): a, c, g or t
  modified_base (2104737)..(2104737): a, c, g or t
  modified_base (2105664)..(2105664): a, c, g or t
  modified_base (2108892)..(2108892): a, c, g or t
  modified_base (2110162)..(2110162): a, c, g or t
  modified_base (2110602)..(2110602): a, c, g or t
  modified_base (2112134)..(2112134): a, c, g or t
  modified_base (2112164)..(2112164): a, c, g or t
  modified_base (2112214)..(2112214): a, c, g or t
  modified_base (2114321)..(2114326): a, c, g or t
  modified_base (2114362)..(2114362): a, c, g or t
  modified_base (2114702)..(2114703): a, c, g or t
  modified_base (2114706)..(2114712): a, c, g or t
  modified_base (2114811)..(2114812): a, c, g or t
  modified_base (2114823)..(2114954): a, c, g or t
  modified_base (2114959)..(2114959): a, c, g or t
  modified_base (2114996)..(2114997): a, c, g or t
  modified_base (2115027)..(2115028): a, c, g or t
  modified_base (2115061)..(2115096): a, c, g or t
  modified_base (2115098)..(2115099): a, c, g or t
  modified_base (2115712)..(2115717): a, c, g or t
  modified_base (2119382)..(2119382): a, c, g or t
  modified_base (2119846)..(2119846): a, c, g or t
  modified_base (2120341)..(2120342): a, c, g or t
  modified_base (2120347)..(2120352): a, c, g or t
  modified_base (2120354)..(2120355): a, c, g or t
  modified_base (2120736)..(2120740): a, c, g or t
  modified_base (2120899)..(2120900): a, c, g or t
  modified_base (2121777)..(2121777): a, c, g or t
  modified_base (2121964)..(2121967): a, c, g or t
  modified_base (2123638)..(2123643): a, c, g or t
  modified_base (2124069)..(2124069): a, c, g or t
  modified_base (2124123)..(2124123): a, c, g or t
  modified_base (2124336)..(2124336): a, c, g or t
  modified_base (2129186)..(2129186): a, c, g or t
  modified_base (2129786)..(2129789): a, c, g or t
  modified_base (2130807)..(2130807): a, c, g or t
  modified_base (2131544)..(2131549): a, c, g or t
  modified_base (2132117)..(2132117): a, c, g or t
  modified_base (2132147)..(2132147): a, c, g or t
  modified_base (2134318)..(2134320): a, c, g or t
  modified_base (2134553)..(2134560): a, c, g or t
  modified_base (2135962)..(2135962): a, c, g or t
  modified_base (2135995)..(2135995): a, c, g or t
  modified_base (2136511)..(2136524): a, c, g or t
  modified_base (2136527)..(2136527): a, c, g or t
  modified_base (2140633)..(2140633): a, c, g or t
  modified_base (2140690)..(2140690): a, c, g or t
  modified_base (2140693)..(2140693): a, c, g or t
  modified_base (2140943)..(2140943): a, c, g or t
  modified_base (2140977)..(2140977): a, c, g or t
  modified_base (2141554)..(2141558): a, c, g or t
  modified_base (2143325)..(2143325): a, c, g or t
  modified_base (2143601)..(2143601): a, c, g or t
  modified_base (2144414)..(2144414): a, c, g or t
  modified_base (2147332)..(2147337): a, c, g or t
  modified_base (2147339)..(2147341): a, c, g or t
  modified_base (2147976)..(2147980): a, c, g or t
  modified_base (2148303)..(2148303): a, c, g or t
  modified_base (2148477)..(2148477): a, c, g or t
  modified_base (2149841)..(2149841): a, c, g or t
  modified_base (2151535)..(2151535): a, c, g or t
  modified_base (2151589)..(2151592): a, c, g or t
  modified_base (2154321)..(2154321): a, c, g or t
  modified_base (2156144)..(2156144): a, c, g or t
  modified_base (2156147)..(2156156): a, c, g or t
  modified_base (2156160)..(2156160): a, c, g or t
  modified_base (2156163)..(2156163): a, c, g or t
  modified_base (2156562)..(2156562): a, c, g or t
  modified_base (2157923)..(2157923): a, c, g or t
  modified_base (2158164)..(2158164): a, c, g or t
  modified_base (2159069)..(2159069): a, c, g or t
  modified_base (2161121)..(2161121): a, c, g or t
  modified_base (2161179)..(2161179): a, c, g or t
  modified_base (2162418)..(2162421): a, c, g or t
  modified_base (2162454)..(2162454): a, c, g or t
  modified_base (2162525)..(2162528): a, c, g or t
  modified_base (2162531)..(2162531): a, c, g or t
  modified_base (2162534)..(2162544): a, c, g or t
  modified_base (2162854)..(2162854): a, c, g or t
  modified_base (2162933)..(2162933): a, c, g or t
  modified_base (2165297)..(2165297): a, c, g or t
  modified_base (2166706)..(2166706): a, c, g or t
  modified_base (2167524)..(2167524): a, c, g or t
  modified_base (2167580)..(2167580): a, c, g or t
  modified_base (2168833)..(2168833): a, c, g or t
  modified_base (2170269)..(2170269): a, c, g or t
  modified_base (2170643)..(2170643): a, c, g or t
  modified_base (2170649)..(2170649): a, c, g or t
  modified_base (2171637)..(2171637): a, c, g or t
  modified_base (2172230)..(2172230): a, c, g or t
  modified_base (2175366)..(2175367): a, c, g or t
  modified_base (2175370)..(2175371): a, c, g or t
  modified_base (2176248)..(2176248): a, c, g or t
  modified_base (2176611)..(2176615): a, c, g or t
  modified_base (2176753)..(2176753): a, c, g or t
  modified_base (2176926)..(2176926): a, c, g or t
  modified_base (2177955)..(2177955): a, c, g or t
  modified_base (2178735)..(2178735): a, c, g or t
  modified_base (2180395)..(2180395): a, c, g or t
  modified_base (2180650)..(2180653): a, c, g or t
  modified_base (2184448)..(2184448): a, c, g or t
  modified_base (2184985)..(2184985): a, c, g or t
  modified_base (2185924)..(2185929): a, c, g or t
  modified_base (2185964)..(2185964): a, c, g or t
  modified_base (2185995)..(2185995): a, c, g or t
  modified_base (2186028)..(2186028): a, c, g or t
  modified_base (2186031)..(2186031): a, c, g or t
  modified_base (2186039)..(2186039): a, c, g or t
  modified_base (2186095)..(2186095): a, c, g or t
  modified_base (2188556)..(2188556): a, c, g or t
  modified_base (2189102)..(2189102): a, c, g or t
  modified_base (2190201)..(2190201): a, c, g or t
  modified_base (2190461)..(2190461): a, c, g or t
  modified_base (2190528)..(2190528): a, c, g or t
  modified_base (2190559)..(2190559): a, c, g or t
  modified_base (2190865)..(2190865): a, c, g or t
  modified_base (2190884)..(2190884): a, c, g or t
  modified_base (2193277)..(2193277): a, c, g or t
  modified_base (2193324)..(2193324): a, c, g or t
  modified_base (2193369)..(2193369): a, c, g or t
  modified_base (2193412)..(2193412): a, c, g or t
  modified_base (2195749)..(2195749): a, c, g or t
  modified_base (2196857)..(2196862): a, c, g or t
  modified_base (2199014)..(2199014): a, c, g or t
  modified_base (2200903)..(2200903): a, c, g or t
  modified_base (2203490)..(2203490): a, c, g or t
  modified_base (2204742)..(2204743): a, c, g or t
  modified_base (2204746)..(2204755): a, c, g or t
  modified_base (2206807)..(2206812): a, c, g or t
  modified_base (2209392)..(2209392): a, c, g or t
  modified_base (2210768)..(2210768): a, c, g or t
  modified_base (2210983)..(2210986): a, c, g or t
  modified_base (2211374)..(2211374): a, c, g or t
  modified_base (2212180)..(2212180): a, c, g or t
  modified_base (2212324)..(2212324): a, c, g or t
  modified_base (2215006)..(2215009): a, c, g or t
  modified_base (2215016)..(2215016): a, c, g or t
  modified_base (2215072)..(2215077): a, c, g or t
  modified_base (2215087)..(2215087): a, c, g or t
  modified_base (2215545)..(2215545): a, c, g or t
  modified_base (2216652)..(2216652): a, c, g or t
  modified_base (2218962)..(2219000): a, c, g or t
  modified_base (2219002)..(2219002): a, c, g or t
  modified_base (2219023)..(2219027): a, c, g or t
  modified_base (2220740)..(2220748): a, c, g or t
  modified_base (2221594)..(2221594): a, c, g or t
  modified_base (2221826)..(2221829): a, c, g or t
  modified_base (2222192)..(2222192): a, c, g or t
  modified_base (2224885)..(2224885): a, c, g or t
  modified_base (2224888)..(2224893): a, c, g or t
  modified_base (2224898)..(2224899): a, c, g or t
  modified_base (2225896)..(2225896): a, c, g or t
  modified_base (2226475)..(2226475): a, c, g or t
  modified_base (2226527)..(2226527): a, c, g or t
  modified_base (2226902)..(2226902): a, c, g or t
  modified_base (2227975)..(2227975): a, c, g or t
  modified_base (2229073)..(2229073): a, c, g or t
  modified_base (2230791)..(2230794): a, c, g or t
  modified_base (2230796)..(2230796): a, c, g or t
  modified_base (2232274)..(2232274): a, c, g or t
  modified_base (2233491)..(2233491): a, c, g or t
  modified_base (2233493)..(2233493): a, c, g or t
  modified_base (2234294)..(2234294): a, c, g or t
  modified_base (2236848)..(2236848): a, c, g or t
  modified_base (2237825)..(2237825): a, c, g or t
  modified_base (2240303)..(2240303): a, c, g or t
  modified_base (2241256)..(2241256): a, c, g or t
  modified_base (2243119)..(2243119): a, c, g or t
  modified_base (2245078)..(2245078): a, c, g or t
  modified_base (2245098)..(2245098): a, c, g or t
  modified_base (2245236)..(2245237): a, c, g or t
  modified_base (2245239)..(2245247): a, c, g or t
  modified_base (2245996)..(2245999): a, c, g or t
  modified_base (2248493)..(2248496): a, c, g or t
  modified_base (2249987)..(2249987): a, c, g or t
  modified_base (2254511)..(2254517): a, c, g or t
  modified_base (2255966)..(2255966): a, c, g or t
  modified_base (2256338)..(2256341): a, c, g or t
  modified_base (2256745)..(2256751): a, c, g or t
  modified_base (2258175)..(2258175): a, c, g or t
  modified_base (2259270)..(2259270): a, c, g or t
  modified_base (2261843)..(2261843): a, c, g or t
  modified_base (2261848)..(2261858): a, c, g or t
  modified_base (2262697)..(2262697): a, c, g or t
  modified_base (2262705)..(2262705): a, c, g or t
  modified_base (2265397)..(2265397): a, c, g or t
  modified_base (2265560)..(2265560): a, c, g or t
  modified_base (2265732)..(2265733): a, c, g or t
  modified_base (2265739)..(2265743): a, c, g or t
  modified_base (2267160)..(2267160): a, c, g or t
  modified_base (2267207)..(2267207): a, c, g or t
  modified_base (2267224)..(2267224): a, c, g or t
  modified_base (2267238)..(2267238): a, c, g or t
  modified_base (2267249)..(2267249): a, c, g or t
  modified_base (2268168)..(2268168): a, c, g or t
  modified_base (2268646)..(2268646): a, c, g or t
  modified_base (2268741)..(2268741): a, c, g or t
  modified_base (2270937)..(2270937): a, c, g or t
  modified_base (2271317)..(2271317): a, c, g or t
  modified_base (2271865)..(2271865): a, c, g or t
  modified_base (2271892)..(2271892): a, c, g or t
  modified_base (2271906)..(2271906): a, c, g or t
  modified_base (2271952)..(2271952): a, c, g or t
  modified_base (2272263)..(2272263): a, c, g or t
  modified_base (2272480)..(2272481): a, c, g or t
  modified_base (2272484)..(2272487): a, c, g or t
  modified_base (2272836)..(2272836): a, c, g or t
  modified_base (2272974)..(2272974): a, c, g or t
  modified_base (2273263)..(2273263): a, c, g or t
  modified_base (2273624)..(2273627): a, c, g or t
  modified_base (2277161)..(2277161): a, c, g or t
  modified_base (2278605)..(2278628): a, c, g or t
  modified_base (2278646)..(2278648): a, c, g or t
  modified_base (2278650)..(2278651): a, c, g or t
  modified_base (2278654)..(2278654): a, c, g or t
  modified_base (2278815)..(2278815): a, c, g or t
  modified_base (2279832)..(2279832): a, c, g or t
  modified_base (2279834)..(2279837): a, c, g or t
  modified_base (2280878)..(2280878): a, c, g or t
  modified_base (2280986)..(2280986): a, c, g or t
  modified_base (2281557)..(2281557): a, c, g or t
  modified_base (2282449)..(2282449): a, c, g or t
  modified_base (2282536)..(2282536): a, c, g or t
  modified_base (2283027)..(2283027): a, c, g or t
  modified_base (2284291)..(2284292): a, c, g or t
  modified_base (2284294)..(2284305): a, c, g or t
  modified_base (2285953)..(2285953): a, c, g or t
  modified_base (2287001)..(2287003): a, c, g or t
  modified_base (2287446)..(2287449): a, c, g or t
  modified_base (2287452)..(2287455): a, c, g or t
  modified_base (2288743)..(2288743): a, c, g or t
  modified_base (2288862)..(2288862): a, c, g or t
  modified_base (2288933)..(2288933): a, c, g or t
  modified_base (2290227)..(2290233): a, c, g or t
  modified_base (2290907)..(2290907): a, c, g or t
  modified_base (2290917)..(2290917): a, c, g or t
  modified_base (2290954)..(2290954): a, c, g or t
  modified_base (2291144)..(2291144): a, c, g or t
  modified_base (2291959)..(2291962): a, c, g or t
  modified_base (2292442)..(2292442): a, c, g or t
  modified_base (2293207)..(2293210): a, c, g or t
  modified_base (2295856)..(2295861): a, c, g or t
  modified_base (2295867)..(2295868): a, c, g or t
  modified_base (2295966)..(2295969): a, c, g or t
  modified_base (2295993)..(2296024): a, c, g or t
  modified_base (2296041)..(2296042): a, c, g or t
  modified_base (2296044)..(2296045): a, c, g or t
  modified_base (2296051)..(2296051): a, c, g or t
  modified_base (2296054)..(2296068): a, c, g or t
  modified_base (2296772)..(2296775): a, c, g or t
  modified_base (2297102)..(2297102): a, c, g or t
  modified_base (2297706)..(2297706): a, c, g or t
  modified_base (2297885)..(2297885): a, c, g or t
  modified_base (2298769)..(2298769): a, c, g or t
  modified_base (2299225)..(2299229): a, c, g or t
  modified_base (2300238)..(2300238): a, c, g or t
  modified_base (2301867)..(2301867): a, c, g or t
  modified_base (2303275)..(2303275): a, c, g or t
  modified_base (2305692)..(2305692): a, c, g or t
  modified_base (2306144)..(2306145): a, c, g or t
  modified_base (2306404)..(2306416): a, c, g or t
  modified_base (2306929)..(2306929): a, c, g or t
  modified_base (2307052)..(2307052): a, c, g or t
  modified_base (2307174)..(2307175): a, c, g or t
  modified_base (2307177)..(2307178): a, c, g or t
  modified_base (2307412)..(2307412): a, c, g or t
  modified_base (2307452)..(2307457): a, c, g or t
  modified_base (2307459)..(2307460): a, c, g or t
  modified_base (2307536)..(2307537): a, c, g or t
  modified_base (2307543)..(2307546): a, c, g or t
  modified_base (2307548)..(2307602): a, c, g or t
  modified_base (2307608)..(2307609): a, c, g or t
  modified_base (2307613)..(2307614): a, c, g or t
  modified_base (2307618)..(2307619): a, c, g or t
  modified_base (2307623)..(2307680): a, c, g or t
  modified_base (2307686)..(2307687): a, c, g or t
  modified_base (2307700)..(2307759): a, c, g or t
  modified_base (2307765)..(2307766): a, c, g or t
  modified_base (2307798)..(2307798): a, c, g or t
  modified_base (2307821)..(2307821): a, c, g or t
  modified_base (2307823)..(2307824): a, c, g or t
  modified_base (2307834)..(2307835): a, c, g or t
  modified_base (2307839)..(2307840): a, c, g or t
  modified_base (2307844)..(2307845): a, c, g or t
  modified_base (2307849)..(2307855): a, c, g or t
  modified_base (2307866)..(2307867): a, c, g or t
  modified_base (2307871)..(2307872): a, c, g or t
  modified_base (2307878)..(2307926): a, c, g or t
  modified_base (2307928)..(2307929): a, c, g or t
  modified_base (2307951)..(2308002): a, c, g or t
  modified_base (2308004)..(2308005): a, c, g or t
  modified_base (2308058)..(2308101): a, c, g or t
  modified_base (2308103)..(2308107): a, c, g or t
  modified_base (2308111)..(2308112): a, c, g or t
  modified_base (2308291)..(2308336): a, c, g or t
  modified_base (2308415)..(2308415): a, c, g or t
  modified_base (2308467)..(2308467): a, c, g or t
  modified_base (2308473)..(2308473): a, c, g or t
  modified_base (2308522)..(2308522): a, c, g or t
  modified_base (2308535)..(2308535): a, c, g or t
  modified_base (2308547)..(2308547): a, c, g or t
  modified_base (2308565)..(2308565): a, c, g or t
  modified_base (2308569)..(2308569): a, c, g or t
  modified_base (2308586)..(2308586): a, c, g or t
  modified_base (2308595)..(2308595): a, c, g or t
  modified_base (2308645)..(2308645): a, c, g or t
  modified_base (2308705)..(2308705): a, c, g or t
  modified_base (2308732)..(2308732): a, c, g or t
  modified_base (2308871)..(2308908): a, c, g or t
  modified_base (2308965)..(2308965): a, c, g or t
  modified_base (2308968)..(2308970): a, c, g or t
  modified_base (2308972)..(2308976): a, c, g or t
  modified_base (2309022)..(2309062): a, c, g or t
  modified_base (2309166)..(2309173): a, c, g or t
  modified_base (2309175)..(2309182): a, c, g or t
  modified_base (2309199)..(2309199): a, c, g or t
  modified_base (2309353)..(2309353): a, c, g or t
  modified_base (2309361)..(2309361): a, c, g or t
  modified_base (2309400)..(2309401): a, c, g or t
  modified_base (2309403)..(2309408): a, c, g or t
  modified_base (2309410)..(2309411): a, c, g or t
  modified_base (2309416)..(2309416): a, c, g or t
  modified_base (2309614)..(2309620): a, c, g or t
  modified_base (2309649)..(2309649): a, c, g or t
  modified_base (2309652)..(2309704): a, c, g or t
  modified_base (2309890)..(2309895): a, c, g or t
  modified_base (2309899)..(2309899): a, c, g or t
  modified_base (2309924)..(2309924): a, c, g or t
  modified_base (2309993)..(2310034): a, c, g or t
  modified_base (2310043)..(2310043): a, c, g or t
  modified_base (2310106)..(2310109): a, c, g or t
  modified_base (2310180)..(2310180): a, c, g or t
  modified_base (2310211)..(2310211): a, c, g or t
  modified_base (2310234)..(2310234): a, c, g or t
  modified_base (2310248)..(2310248): a, c, g or t
  modified_base (2310307)..(2310309): a, c, g or t
  modified_base (2310332)..(2310372): a, c, g or t
  modified_base (2310525)..(2310525): a, c, g or t
  modified_base (2310551)..(2310551): a, c, g or t
  modified_base (2310556)..(2310556): a, c, g or t
  modified_base (2310610)..(2310610): a, c, g or t
  modified_base (2310614)..(2310614): a, c, g or t
  modified_base (2310617)..(2310617): a, c, g or t
  modified_base (2310622)..(2310639): a, c, g or t
  modified_base (2310649)..(2310649): a, c, g or t
  modified_base (2310662)..(2310663): a, c, g or t
  modified_base (2310671)..(2310671): a, c, g or t
  modified_base (2310725)..(2310773): a, c, g or t
  modified_base (2310802)..(2310802): a, c, g or t
  modified_base (2311098)..(2311101): a, c, g or t
  modified_base (2311155)..(2311192): a, c, g or t
  modified_base (2311264)..(2311264): a, c, g or t
  modified_base (2311291)..(2311291): a, c, g or t
  modified_base (2311304)..(2311307): a, c, g or t
  modified_base (2311318)..(2311319): a, c, g or t
  modified_base (2311332)..(2311335): a, c, g or t
  modified_base (2311341)..(2311342): a, c, g or t
  modified_base (2311344)..(2311390): a, c, g or t
  modified_base (2311392)..(2311393): a, c, g or t
  modified_base (2311431)..(2311431): a, c, g or t
  modified_base (2311459)..(2311615): a, c, g or t
  modified_base (2311647)..(2311648): a, c, g or t
  modified_base (2311671)..(2311673): a, c, g or t
  modified_base (2311675)..(2311729): a, c, g or t
  modified_base (2311766)..(2311848): a, c, g or t
  modified_base (2311859)..(2311860): a, c, g or t
  modified_base (2311932)..(2312019): a, c, g or t
  modified_base (2312279)..(2312284): a, c, g or t
  modified_base (2312304)..(2312320): a, c, g or t
  modified_base (2312334)..(2312334): a, c, g or t
  modified_base (2312339)..(2312340): a, c, g or t
  modified_base (2312343)..(2312343): a, c, g or t
  modified_base (2312426)..(2312466): a, c, g or t
  modified_base (2312472)..(2312473): a, c, g or t
  modified_base (2312488)..(2312587): a, c, g or t
  modified_base (2312628)..(2312642): a, c, g or t
  modified_base (2312647)..(2312648): a, c, g or t
  modified_base (2312716)..(2312723): a, c, g or t
  modified_base (2312746)..(2312850): a, c, g or t
  modified_base (2312875)..(2312934): a, c, g or t
  modified_base (2312958)..(2313029): a, c, g or t
  modified_base (2313031)..(2313031): a, c, g or t
  modified_base (2313068)..(2313113): a, c, g or t
  modified_base (2313155)..(2313197): a, c, g or t
  modified_base (2313241)..(2313241): a, c, g or t
  modified_base (2313277)..(2313277): a, c, g or t
  modified_base (2313280)..(2313280): a, c, g or t
  modified_base (2313311)..(2313351): a, c, g or t
  modified_base (2313365)..(2313365): a, c, g or t
  modified_base (2313370)..(2313370): a, c, g or t
  modified_base (2313403)..(2313403): a, c, g or t
  modified_base (2313439)..(2313439): a, c, g or t
  modified_base (2313463)..(2313463): a, c, g or t
  modified_base (2313519)..(2313519): a, c, g or t
  modified_base (2313552)..(2313553): a, c, g or t
  modified_base (2313556)..(2313598): a, c, g or t
  modified_base (2313605)..(2313605): a, c, g or t
  modified_base (2313673)..(2313676): a, c, g or t
  modified_base (2313685)..(2313724): a, c, g or t
  modified_base (2313738)..(2313738): a, c, g or t
  modified_base (2313819)..(2313819): a, c, g or t
  modified_base (2313823)..(2313843): a, c, g or t
  modified_base (2313912)..(2313912): a, c, g or t
  modified_base (2313978)..(2313978): a, c, g or t
  modified_base (2313987)..(2313987): a, c, g or t
  modified_base (2313996)..(2313996): a, c, g or t
  modified_base (2314018)..(2314062): a, c, g or t
  modified_base (2314181)..(2314181): a, c, g or t
  modified_base (2314334)..(2314374): a, c, g or t
  modified_base (2314523)..(2314523): a, c, g or t
  modified_base (2314604)..(2314604): a, c, g or t
  modified_base (2314644)..(2314681): a, c, g or t
  modified_base (2314685)..(2314686): a, c, g or t
  modified_base (2314710)..(2314713): a, c, g or t
  modified_base (2314721)..(2314721): a, c, g or t
  modified_base (2314756)..(2314756): a, c, g or t
  modified_base (2314835)..(2314885): a, c, g or t
  modified_base (2314907)..(2314946): a, c, g or t
  modified_base (2314979)..(2314979): a, c, g or t
  modified_base (2315009)..(2315009): a, c, g or t
  modified_base (2315027)..(2315027): a, c, g or t
  modified_base (2315033)..(2315034): a, c, g or t
  modified_base (2315037)..(2315077): a, c, g or t
  modified_base (2315090)..(2315095): a, c, g or t
  modified_base (2315322)..(2315322): a, c, g or t
  modified_base (2315337)..(2315337): a, c, g or t
  modified_base (2315355)..(2315355): a, c, g or t
  modified_base (2315358)..(2315360): a, c, g or t
  modified_base (2315366)..(2315406): a, c, g or t
  modified_base (2315409)..(2315409): a, c, g or t
  modified_base (2315457)..(2315502): a, c, g or t
  modified_base (2315511)..(2315511): a, c, g or t
  modified_base (2315517)..(2315517): a, c, g or t
  modified_base (2315520)..(2315520): a, c, g or t
  modified_base (2315526)..(2315579): a, c, g or t
  modified_base (2315623)..(2315662): a, c, g or t
  modified_base (2315706)..(2315706): a, c, g or t
  modified_base (2315732)..(2315780): a, c, g or t
  modified_base (2315804)..(2315806): a, c, g or t
  modified_base (2315810)..(2315811): a, c, g or t
  modified_base (2315813)..(2315828): a, c, g or t
  modified_base (2315903)..(2315906): a, c, g or t
  modified_base (2315908)..(2315908): a, c, g or t
  modified_base (2316008)..(2316008): a, c, g or t
  modified_base (2316012)..(2316012): a, c, g or t
  modified_base (2316165)..(2316165): a, c, g or t
  modified_base (2316291)..(2316291): a, c, g or t
  modified_base (2316300)..(2316300): a, c, g or t
  modified_base (2316315)..(2316315): a, c, g or t
  modified_base (2316327)..(2316327): a, c, g or t
  modified_base (2316465)..(2316465): a, c, g or t
  modified_base (2316519)..(2316519): a, c, g or t
  modified_base (2316541)..(2316546): a, c, g or t
  modified_base (2316683)..(2316683): a, c, g or t
  modified_base (2316755)..(2316755): a, c, g or t
  modified_base (2316785)..(2316785): a, c, g or t
  modified_base (2316836)..(2316836): a, c, g or t
  modified_base (2316948)..(2316950): a, c, g or t
  modified_base (2317054)..(2317054): a, c, g or t
  modified_base (2317062)..(2317062): a, c, g or t
  modified_base (2317183)..(2317183): a, c, g or t
  modified_base (2317186)..(2317186): a, c, g or t
  modified_base (2317188)..(2317206): a, c, g or t
  modified_base (2317210)..(2317210): a, c, g or t
  modified_base (2317218)..(2317219): a, c, g or t
  modified_base (2317221)..(2317222): a, c, g or t
  modified_base (2317375)..(2317375): a, c, g or t
  modified_base (2317399)..(2317399): a, c, g or t
  modified_base (2317486)..(2317486): a, c, g or t
  modified_base (2317726)..(2317726): a, c, g or t
  modified_base (2317737)..(2317737): a, c, g or t
  modified_base (2317749)..(2317749): a, c, g or t
  modified_base (2317797)..(2317797): a, c, g or t
  modified_base (2317813)..(2317813): a, c, g or t
  modified_base (2317903)..(2317903): a, c, g or t
  modified_base (2319617)..(2319617): a, c, g or t
  modified_base (2319671)..(2319671): a, c, g or t
  modified_base (2319673)..(2319676): a, c, g or t
  modified_base (2319782)..(2319782): a, c, g or t
  modified_base (2320203)..(2320203): a, c, g or t
  modified_base (2320273)..(2320278): a, c, g or t
  modified_base (2320282)..(2320282): a, c, g or t
  modified_base (2320333)..(2320336): a, c, g or t
  modified_base (2320339)..(2320339): a, c, g or t
  modified_base (2320383)..(2320400): a, c, g or t
  modified_base (2320412)..(2320412): a, c, g or t
  modified_base (2320526)..(2320526): a, c, g or t
  modified_base (2320595)..(2320643): a, c, g or t
  modified_base (2320646)..(2320646): a, c, g or t
  modified_base (2320673)..(2320673): a, c, g or t
  modified_base (2320675)..(2320720): a, c, g or t
  modified_base (2320731)..(2320732): a, c, g or t
  modified_base (2320742)..(2320782): a, c, g or t
  modified_base (2320803)..(2320816): a, c, g or t
  modified_base (2320830)..(2320836): a, c, g or t
  modified_base (2320842)..(2320842): a, c, g or t
  modified_base (2320845)..(2320845): a, c, g or t
  modified_base (2320848)..(2320848): a, c, g or t
  modified_base (2320896)..(2320896): a, c, g or t
  modified_base (2320987)..(2320990): a, c, g or t
  modified_base (2321056)..(2321056): a, c, g or t
  modified_base (2321156)..(2321196): a, c, g or t
  modified_base (2321957)..(2321957): a, c, g or t
  modified_base (2321963)..(2321963): a, c, g or t
  modified_base (2321999)..(2322002): a, c, g or t
  modified_base (2322005)..(2322029): a, c, g or t
  modified_base (2322035)..(2322039): a, c, g or t
  modified_base (2322181)..(2322181): a, c, g or t
  modified_base (2322734)..(2322734): a, c, g or t
  modified_base (2322741)..(2322743): a, c, g or t
  modified_base (2322751)..(2322752): a, c, g or t
  modified_base (2323168)..(2323209): a, c, g or t
  modified_base (2323774)..(2323774): a, c, g or t
  modified_base (2323866)..(2323867): a, c, g or t
  modified_base (2324051)..(2324091): a, c, g or t
  modified_base (2325273)..(2325273): a, c, g or t
  modified_base (2327022)..(2327022): a, c, g or t
  modified_base (2327418)..(2327418): a, c, g or t
  modified_base (2327895)..(2327895): a, c, g or t
  modified_base (2328847)..(2328847): a, c, g or t
  modified_base (2328850)..(2328952): a, c, g or t
  modified_base (2328984)..(2328989): a, c, g or t
  modified_base (2328994)..(2329043): a, c, g or t
  modified_base (2329077)..(2329077): a, c, g or t
  modified_base (2329178)..(2329178): a, c, g or t
  modified_base (2329187)..(2329229): a, c, g or t
  modified_base (2329325)..(2329332): a, c, g or t
  modified_base (2329362)..(2329363): a, c, g or t
  modified_base (2329392)..(2329392): a, c, g or t
  modified_base (2329404)..(2329417): a, c, g or t
  modified_base (2329443)..(2329499): a, c, g or t
  modified_base (2329534)..(2329639): a, c, g or t
  modified_base (2329674)..(2329674): a, c, g or t
  modified_base (2329677)..(2329885): a, c, g or t
  modified_base (2329887)..(2329888): a, c, g or t
  modified_base (2329909)..(2330163): a, c, g or t
  modified_base (2330165)..(2330171): a, c, g or t
  modified_base (2330177)..(2330177): a, c, g or t
  modified_base (2330194)..(2330201): a, c, g or t
  modified_base (2330212)..(2330212): a, c, g or t
  modified_base (2330226)..(2330249): a, c, g or t
  modified_base (2330259)..(2330260): a, c, g or t
  modified_base (2330274)..(2330274): a, c, g or t
  modified_base (2330280)..(2330281): a, c, g or t
  modified_base (2330318)..(2330319): a, c, g or t
  modified_base (2330324)..(2330347): a, c, g or t
  modified_base (2330355)..(2330356): a, c, g or t
  modified_base (2330385)..(2330385): a, c, g or t
  modified_base (2330387)..(2330395): a, c, g or t
  modified_base (2330397)..(2330398): a, c, g or t
  modified_base (2330402)..(2330403): a, c, g or t
  modified_base (2330406)..(2330406): a, c, g or t
  modified_base (2330419)..(2330438): a, c, g or t
  modified_base (2330491)..(2330572): a, c, g or t
  modified_base (2330586)..(2330586): a, c, g or t
  modified_base (2330589)..(2330591): a, c, g or t
  modified_base (2330593)..(2330594): a, c, g or t
  modified_base (2330596)..(2330604): a, c, g or t
  modified_base (2330655)..(2330655): a, c, g or t
  modified_base (2330658)..(2330664): a, c, g or t
  modified_base (2330755)..(2330779): a, c, g or t
  modified_base (2330791)..(2330792): a, c, g or t
  modified_base (2330803)..(2330817): a, c, g or t
  modified_base (2330841)..(2330857): a, c, g or t
  modified_base (2330914)..(2330953): a, c, g or t
  modified_base (2331105)..(2331156): a, c, g or t
  modified_base (2331179)..(2331179): a, c, g or t
  modified_base (2331201)..(2331248): a, c, g or t
  modified_base (2331262)..(2331262): a, c, g or t
  modified_base (2331364)..(2331364): a, c, g or t
  modified_base (2331403)..(2331465): a, c, g or t
  modified_base (2331689)..(2331696): a, c, g or t
  modified_base (2332026)..(2332066): a, c, g or t
  modified_base (2332192)..(2332239): a, c, g or t
  modified_base (2332247)..(2332247): a, c, g or t
  modified_base (2332304)..(2332307): a, c, g or t
  modified_base (2332335)..(2332336): a, c, g or t
  modified_base (2332338)..(2332341): a, c, g or t
  modified_base (2332416)..(2332453): a, c, g or t
  modified_base (2332486)..(2332486): a, c, g or t
  modified_base (2332537)..(2332594): a, c, g or t
  modified_base (2332966)..(2333017): a, c, g or t
  modified_base (2333022)..(2333023): a, c, g or t
  modified_base (2333086)..(2333089): a, c, g or t
  modified_base (2333375)..(2333434): a, c, g or t
  modified_base (2333447)..(2333448): a, c, g or t
  modified_base (2333452)..(2333453): a, c, g or t
  modified_base (2333456)..(2333464): a, c, g or t
  modified_base (2333466)..(2333466): a, c, g or t
  modified_base (2333555)..(2333555): a, c, g or t
  modified_base (2333595)..(2333676): a, c, g or t
  modified_base (2333678)..(2333681): a, c, g or t
  modified_base (2333683)..(2333683): a, c, g or t
  modified_base (2333703)..(2333705): a, c, g or t
  modified_base (2333716)..(2333720): a, c, g or t
  modified_base (2333790)..(2333790): a, c, g or t
  modified_base (2333792)..(2333800): a, c, g or t
  modified_base (2333867)..(2333907): a, c, g or t
  modified_base (2333909)..(2333910): a, c, g or t
  modified_base (2333923)..(2333924): a, c, g or t
  modified_base (2333952)..(2333959): a, c, g or t
  modified_base (2334016)..(2334016): a, c, g or t
  modified_base (2334028)..(2334030): a, c, g or t
  modified_base (2334033)..(2334034): a, c, g or t
  modified_base (2334036)..(2334048): a, c, g or t
  modified_base (2334085)..(2334141): a, c, g or t
  modified_base (2334147)..(2334147): a, c, g or t
  modified_base (2334276)..(2334315): a, c, g or t
  modified_base (2334391)..(2334430): a, c, g or t
  modified_base (2334465)..(2334465): a, c, g or t
  modified_base (2334496)..(2334537): a, c, g or t
  modified_base (2334681)..(2334721): a, c, g or t
  modified_base (2335005)..(2335005): a, c, g or t
  modified_base (2335128)..(2335128): a, c, g or t
  modified_base (2335478)..(2335480): a, c, g or t
  modified_base (2335482)..(2335525): a, c, g or t
  modified_base (2335543)..(2335543): a, c, g or t
  modified_base (2335621)..(2335624): a, c, g or t
  modified_base (2335626)..(2335693): a, c, g or t
  modified_base (2335715)..(2335715): a, c, g or t
  modified_base (2335720)..(2335745): a, c, g or t
  modified_base (2335749)..(2335750): a, c, g or t
  modified_base (2335792)..(2335793): a, c, g or t
  modified_base (2335795)..(2335797): a, c, g or t
  modified_base (2335799)..(2335803): a, c, g or t
  modified_base (2335824)..(2335858): a, c, g or t
  modified_base (2335874)..(2335874): a, c, g or t
  modified_base (2335884)..(2335884): a, c, g or t
  modified_base (2335913)..(2335914): a, c, g or t
  modified_base (2335971)..(2335996): a, c, g or t
  modified_base (2336002)..(2336003): a, c, g or t
  modified_base (2336047)..(2336121): a, c, g or t
  modified_base (2336129)..(2336129): a, c, g or t
  modified_base (2336141)..(2336142): a, c, g or t
  modified_base (2336144)..(2336176): a, c, g or t
  modified_base (2336201)..(2336201): a, c, g or t
  modified_base (2336203)..(2336204): a, c, g or t
  modified_base (2336231)..(2336265): a, c, g or t
  modified_base (2336282)..(2336282): a, c, g or t
  modified_base (2336306)..(2336316): a, c, g or t
  modified_base (2336333)..(2336333): a, c, g or t
  modified_base (2336336)..(2336336): a, c, g or t
  modified_base (2336340)..(2336360): a, c, g or t
  modified_base (2336371)..(2336372): a, c, g or t
  modified_base (2336374)..(2336375): a, c, g or t
  modified_base (2336378)..(2336378): a, c, g or t
  modified_base (2336381)..(2336382): a, c, g or t
  modified_base (2336388)..(2336390): a, c, g or t
  modified_base (2336401)..(2336402): a, c, g or t
  modified_base (2336409)..(2336412): a, c, g or t
  modified_base (2336420)..(2336495): a, c, g or t
  modified_base (2336511)..(2336511): a, c, g or t
  modified_base (2336519)..(2336545): a, c, g or t
  modified_base (2336582)..(2336583): a, c, g or t
  modified_base (2336601)..(2336601): a, c, g or t
  modified_base (2336605)..(2336621): a, c, g or t
  modified_base (2336626)..(2336626): a, c, g or t
  modified_base (2336628)..(2336630): a, c, g or t
  modified_base (2336684)..(2336684): a, c, g or t
  modified_base (2336693)..(2336693): a, c, g or t
  modified_base (2336697)..(2336727): a, c, g or t
  modified_base (2336732)..(2336734): a, c, g or t
  modified_base (2336768)..(2336768): a, c, g or t
  modified_base (2336795)..(2336795): a, c, g or t
  modified_base (2336802)..(2336809): a, c, g or t
  modified_base (2336840)..(2336841): a, c, g or t
  modified_base (2336843)..(2336878): a, c, g or t
  modified_base (2336882)..(2336883): a, c, g or t
  modified_base (2336888)..(2336889): a, c, g or t
  modified_base (2336896)..(2336897): a, c, g or t
  modified_base (2336899)..(2336933): a, c, g or t
  modified_base (2336942)..(2336942): a, c, g or t
  modified_base (2337063)..(2337063): a, c, g or t
  modified_base (2337347)..(2337349): a, c, g or t
  modified_base (2337438)..(2337439): a, c, g or t
  modified_base (2337725)..(2337751): a, c, g or t
  modified_base (2338050)..(2338050): a, c, g or t
  modified_base (2338206)..(2338208): a, c, g or t
  modified_base (2338210)..(2338214): a, c, g or t
  modified_base (2338218)..(2338219): a, c, g or t
  modified_base (2338252)..(2338314): a, c, g or t
  modified_base (2338357)..(2338386): a, c, g or t
  modified_base (2338390)..(2338391): a, c, g or t
  modified_base (2338403)..(2338403): a, c, g or t
  modified_base (2338407)..(2338407): a, c, g or t
  modified_base (2338409)..(2338410): a, c, g or t
  modified_base (2339040)..(2339041): a, c, g or t
  modified_base (2340101)..(2340101): a, c, g or t
  modified_base (2340209)..(2340209): a, c, g or t
  modified_base (2341096)..(2341096): a, c, g or t
  modified_base (2341482)..(2341482): a, c, g or t
  modified_base (2341517)..(2341517): a, c, g or t
  modified_base (2341570)..(2341570): a, c, g or t
  modified_base (2341948)..(2341948): a, c, g or t
  modified_base (2342183)..(2342184): a, c, g or t
  modified_base (2342653)..(2342654): a, c, g or t
  modified_base (2343190)..(2343191): a, c, g or t
  modified_base (2343661)..(2343662): a, c, g or t
  modified_base (2343760)..(2343760): a, c, g or t
  modified_base (2345077)..(2345077): a, c, g or t
  modified_base (2345364)..(2345364): a, c, g or t
  modified_base (2345596)..(2345596): a, c, g or t
  modified_base (2345598)..(2345599): a, c, g or t
  modified_base (2345624)..(2345624): a, c, g or t
  modified_base (2345912)..(2345913): a, c, g or t
  modified_base (2345977)..(2345978): a, c, g or t
  modified_base (2346920)..(2346920): a, c, g or t
  modified_base (2347710)..(2347719): a, c, g or t
  modified_base (2347944)..(2347947): a, c, g or t
  modified_base (2347952)..(2347952): a, c, g or t
  modified_base (2348602)..(2348642): a, c, g or t
  modified_base (2348663)..(2348705): a, c, g or t
  modified_base (2348728)..(2348768): a, c, g or t
  modified_base (2348792)..(2348832): a, c, g or t
  modified_base (2348858)..(2348858): a, c, g or t
  modified_base (2348860)..(2348898): a, c, g or t
  modified_base (2348922)..(2348961): a, c, g or t
  modified_base (2349003)..(2349011): a, c, g or t
  modified_base (2354137)..(2354137): a, c, g or t
  modified_base (2354149)..(2354149): a, c, g or t
  modified_base (2355304)..(2355304): a, c, g or t
  modified_base (2355325)..(2355325): a, c, g or t
  modified_base (2355338)..(2355338): a, c, g or t
  modified_base (2355683)..(2355683): a, c, g or t
  modified_base (2355712)..(2355712): a, c, g or t
  modified_base (2355725)..(2355725): a, c, g or t
  modified_base (2356518)..(2356521): a, c, g or t
  modified_base (2356945)..(2356945): a, c, g or t
  modified_base (2358816)..(2358816): a, c, g or t
  modified_base (2359731)..(2359736): a, c, g or t
  modified_base (2360809)..(2360810): a, c, g or t
  modified_base (2361034)..(2361034): a, c, g or t
  modified_base (2361283)..(2361283): a, c, g or t
  modified_base (2363173)..(2363174): a, c, g or t
  modified_base (2363177)..(2363179): a, c, g or t
  modified_base (2363346)..(2363349): a, c, g or t
  modified_base (2363389)..(2363391): a, c, g or t
  modified_base (2363668)..(2363668): a, c, g or t
  modified_base (2365723)..(2365723): a, c, g or t
  modified_base (2366181)..(2366190): a, c, g or t
  modified_base (2366406)..(2366413): a, c, g or t
  modified_base (2368192)..(2368192): a, c, g or t
  modified_base (2368671)..(2368671): a, c, g or t
  modified_base (2368746)..(2368746): a, c, g or t
  modified_base (2369318)..(2369318): a, c, g or t
  modified_base (2369320)..(2369322): a, c, g or t
  modified_base (2370530)..(2370530): a, c, g or t
  modified_base (2370704)..(2370704): a, c, g or t
  modified_base (2370708)..(2370708): a, c, g or t
  modified_base (2371116)..(2371116): a, c, g or t
  modified_base (2374782)..(2374782): a, c, g or t
  modified_base (2375594)..(2375597): a, c, g or t
  modified_base (2375689)..(2375692): a, c, g or t
  modified_base (2375990)..(2375990): a, c, g or t
  modified_base (2377589)..(2377589): a, c, g or t
  modified_base (2379803)..(2379803): a, c, g or t
  modified_base (2384380)..(2384380): a, c, g or t
  modified_base (2384534)..(2384535): a, c, g or t
  modified_base (2385449)..(2385450): a, c, g or t
  modified_base (2385485)..(2385486): a, c, g or t
  modified_base (2385492)..(2385498): a, c, g or t
  modified_base (2385574)..(2385690): a, c, g or t
  modified_base (2385722)..(2385725): a, c, g or t
  modified_base (2386088)..(2386088): a, c, g or t
  modified_base (2386090)..(2386091): a, c, g or t
  modified_base (2387456)..(2387457): a, c, g or t
  modified_base (2387459)..(2387460): a, c, g or t
  modified_base (2387517)..(2387519): a, c, g or t
  modified_base (2387840)..(2387840): a, c, g or t
  modified_base (2390132)..(2390132): a, c, g or t
  modified_base (2390275)..(2390275): a, c, g or t
  modified_base (2391458)..(2391458): a, c, g or t
  modified_base (2395031)..(2395035): a, c, g or t
  modified_base (2398174)..(2398174): a, c, g or t
  modified_base (2399148)..(2399148): a, c, g or t
  modified_base (2399219)..(2399223): a, c, g or t
  modified_base (2400774)..(2400774): a, c, g or t
  modified_base (2400806)..(2400806): a, c, g or t
  modified_base (2400825)..(2400830): a, c, g or t
  modified_base (2401194)..(2401194): a, c, g or t
  modified_base (2401642)..(2401642): a, c, g or t
  modified_base (2406672)..(2406675): a, c, g or t
  modified_base (2406778)..(2406782): a, c, g or t
  modified_base (2407667)..(2407667): a, c, g or t
  modified_base (2409963)..(2409964): a, c, g or t
  modified_base (2410236)..(2410239): a, c, g or t
  modified_base (2410283)..(2410283): a, c, g or t
  modified_base (2410357)..(2410361): a, c, g or t
  modified_base (2410364)..(2410364): a, c, g or t
  modified_base (2411914)..(2411914): a, c, g or t
  modified_base (2415771)..(2415774): a, c, g or t
  modified_base (2416399)..(2416400): a, c, g or t
  modified_base (2416406)..(2416407): a, c, g or t
  modified_base (2419025)..(2419026): a, c, g or t
  modified_base (2419132)..(2419135): a, c, g or t
  modified_base (2419137)..(2419138): a, c, g or t
  modified_base (2423085)..(2423086): a, c, g or t
  modified_base (2423655)..(2423658): a, c, g or t
  modified_base (2423662)..(2423672): a, c, g or t
  modified_base (2423795)..(2423810): a, c, g or t
  modified_base (2424695)..(2424696): a, c, g or t
  modified_base (2424698)..(2424701): a, c, g or t
  modified_base (2424737)..(2424746): a, c, g or t
  modified_base (2424902)..(2424903): a, c, g or t
  modified_base (2425955)..(2425956): a, c, g or t
  modified_base (2427322)..(2427323): a, c, g or t
  modified_base (2427528)..(2427529): a, c, g or t
  modified_base (2428812)..(2428824): a, c, g or t
  modified_base (2429615)..(2429625): a, c, g or t
  modified_base (2429628)..(2429629): a, c, g or t
  modified_base (2430550)..(2430553): a, c, g or t
  modified_base (2431764)..(2431765): a, c, g or t
  modified_base (2431768)..(2431774): a, c, g or t
  modified_base (2433072)..(2433080): a, c, g or t
  modified_base (2434190)..(2434194): a, c, g or t
  modified_base (2434280)..(2434319): a, c, g or t
  modified_base (2434400)..(2434439): a, c, g or t
  modified_base (2435669)..(2435669): a, c, g or t
  modified_base (2435672)..(2435677): a, c, g or t
  modified_base (2436931)..(2436931): a, c, g or t
  modified_base (2438463)..(2438463): a, c, g or t
  modified_base (2438476)..(2438479): a, c, g or t
  modified_base (2438659)..(2438662): a, c, g or t
  modified_base (2439809)..(2439815): a, c, g or t
  modified_base (2439853)..(2439853): a, c, g or t
  modified_base (2440058)..(2440058): a, c, g or t
  modified_base (2442035)..(2442050): a, c, g or t
  modified_base (2442068)..(2442068): a, c, g or t
  modified_base (2442147)..(2442150): a, c, g or t
  modified_base (2442154)..(2442154): a, c, g or t
  modified_base (2442254)..(2442259): a, c, g or t
  modified_base (2442333)..(2442334): a, c, g or t
  modified_base (2442503)..(2442504): a, c, g or t
  modified_base (2444244)..(2444244): a, c, g or t
  modified_base (2444523)..(2444528): a, c, g or t
  modified_base (2444663)..(2444667): a, c, g or t
  modified_base (2445080)..(2445080): a, c, g or t
  modified_base (2445083)..(2445083): a, c, g or t
  modified_base (2445225)..(2445229): a, c, g or t
  modified_base (2445349)..(2445349): a, c, g or t
  modified_base (2446713)..(2446713): a, c, g or t
  modified_base (2446954)..(2446957): a, c, g or t
  modified_base (2447029)..(2447037): a, c, g or t
  modified_base (2447352)..(2447352): a, c, g or t
  modified_base (2447375)..(2447378): a, c, g or t
  modified_base (2448091)..(2448092): a, c, g or t
  modified_base (2449867)..(2449868): a, c, g or t
  modified_base (2451715)..(2451715): a, c, g or t
  modified_base (2451903)..(2451905): a, c, g or t
  modified_base (2452097)..(2452102): a, c, g or t
  modified_base (2452141)..(2452141): a, c, g or t
  modified_base (2453032)..(2453036): a, c, g or t
  modified_base (2453039)..(2453040): a, c, g or t
  modified_base (2454987)..(2454987): a, c, g or t
  modified_base (2455984)..(2455984): a, c, g or t
  modified_base (2456655)..(2456655): a, c, g or t
  modified_base (2456657)..(2456657): a, c, g or t
  modified_base (2457838)..(2457842): a, c, g or t
  modified_base (2458137)..(2458137): a, c, g or t
  modified_base (2459333)..(2459333): a, c, g or t
  modified_base (2459657)..(2459657): a, c, g or t
  modified_base (2460569)..(2460574): a, c, g or t
  modified_base (2460804)..(2460812): a, c, g or t
  modified_base (2460861)..(2460876): a, c, g or t
  modified_base (2460883)..(2460887): a, c, g or t
  modified_base (2461542)..(2461542): a, c, g or t
  modified_base (2462806)..(2462811): a, c, g or t
  modified_base (2462867)..(2462867): a, c, g or t
  modified_base (2463194)..(2463194): a, c, g or t
  modified_base (2464545)..(2464549): a, c, g or t
  modified_base (2465559)..(2465603): a, c, g or t
  modified_base (2465623)..(2465623): a, c, g or t
  modified_base (2465726)..(2465726): a, c, g or t
  modified_base (2465737)..(2465776): a, c, g or t
  modified_base (2466316)..(2466320): a, c, g or t
  modified_base (2467746)..(2467747): a, c, g or t
  modified_base (2468314)..(2468319): a, c, g or t
  modified_base (2469098)..(2469103): a, c, g or t
  modified_base (2469155)..(2469155): a, c, g or t
  modified_base (2469158)..(2469158): a, c, g or t
  modified_base (2469161)..(2469161): a, c, g or t
  modified_base (2470080)..(2470081): a, c, g or t
  modified_base (2470954)..(2470959): a, c, g or t
  modified_base (2470996)..(2470996): a, c, g or t
  modified_base (2471004)..(2471004): a, c, g or t
  modified_base (2471615)..(2471615): a, c, g or t
  modified_base (2471665)..(2471669): a, c, g or t
  modified_base (2471759)..(2471763): a, c, g or t
  modified_base (2471778)..(2471778): a, c, g or t
  modified_base (2473846)..(2473849): a, c, g or t
  modified_base (2473910)..(2473913): a, c, g or t
  modified_base (2473936)..(2473937): a, c, g or t
  modified_base (2474002)..(2474002): a, c, g or t
  modified_base (2474476)..(2474476): a, c, g or t
  modified_base (2474521)..(2474521): a, c, g or t
  modified_base (2475132)..(2475135): a, c, g or t
  modified_base (2475217)..(2475217): a, c, g or t
  modified_base (2475379)..(2475380): a, c, g or t
  modified_base (2475384)..(2475391): a, c, g or t
  modified_base (2477794)..(2477794): a, c, g or t
  modified_base (2477799)..(2477799): a, c, g or t
  modified_base (2478667)..(2478670): a, c, g or t
  modified_base (2478818)..(2478818): a, c, g or t
  modified_base (2478832)..(2478832): a, c, g or t
  modified_base (2478852)..(2478852): a, c, g or t
  modified_base (2479070)..(2479081): a, c, g or t
  modified_base (2481456)..(2481456): a, c, g or t
  modified_base (2481538)..(2481538): a, c, g or t
  modified_base (2481964)..(2481967): a, c, g or t
  modified_base (2482144)..(2482149): a, c, g or t
  modified_base (2485041)..(2485042): a, c, g or t
  modified_base (2486726)..(2486726): a, c, g or t
  modified_base (2486958)..(2486958): a, c, g or t
  modified_base (2487431)..(2487435): a, c, g or t
  modified_base (2487471)..(2487471): a, c, g or t
  modified_base (2487680)..(2487680): a, c, g or t
  modified_base (2488798)..(2488798): a, c, g or t
  modified_base (2489140)..(2489143): a, c, g or t
  modified_base (2489310)..(2489313): a, c, g or t
  modified_base (2489315)..(2489320): a, c, g or t
  modified_base (2489480)..(2489483): a, c, g or t
  modified_base (2489596)..(2489599): a, c, g or t
  modified_base (2489601)..(2489614): a, c, g or t
  modified_base (2490647)..(2490647): a, c, g or t
  modified_base (2496717)..(2496720): a, c, g or t
  modified_base (2500859)..(2500896): a, c, g or t
  modified_base (2501034)..(2501077): a, c, g or t
  modified_base (2501695)..(2501695): a, c, g or t
  modified_base (2502321)..(2502329): a, c, g or t
  modified_base (2504069)..(2504069): a, c, g or t
  modified_base (2505410)..(2505410): a, c, g or t
  modified_base (2505553)..(2505553): a, c, g or t
  modified_base (2505556)..(2505560): a, c, g or t
  modified_base (2505584)..(2505584): a, c, g or t
  modified_base (2506706)..(2506706): a, c, g or t
  modified_base (2506886)..(2506886): a, c, g or t
  modified_base (2507412)..(2507421): a, c, g or t
  modified_base (2507519)..(2507519): a, c, g or t
  modified_base (2508426)..(2508426): a, c, g or t
  modified_base (2511396)..(2511396): a, c, g or t
  modified_base (2511398)..(2511401): a, c, g or t
  modified_base (2511407)..(2511407): a, c, g or t
  modified_base (2511566)..(2511570): a, c, g or t
  modified_base (2511643)..(2511643): a, c, g or t
  modified_base (2512041)..(2512045): a, c, g or t
  modified_base (2512049)..(2512049): a, c, g or t
  modified_base (2513078)..(2513078): a, c, g or t
  modified_base (2513253)..(2513253): a, c, g or t
  modified_base (2513543)..(2513543): a, c, g or t
  modified_base (2514290)..(2514290): a, c, g or t
  modified_base (2515213)..(2515214): a, c, g or t
  modified_base (2515216)..(2515222): a, c, g or t
  modified_base (2515272)..(2515280): a, c, g or t
  modified_base (2515285)..(2515288): a, c, g or t
  modified_base (2516358)..(2516358): a, c, g or t
  modified_base (2516475)..(2516475): a, c, g or t
  modified_base (2516722)..(2516726): a, c, g or t
  modified_base (2516900)..(2516903): a, c, g or t
  modified_base (2517311)..(2517312): a, c, g or t
  modified_base (2519031)..(2519031): a, c, g or t
  modified_base (2520332)..(2520333): a, c, g or t
  modified_base (2520335)..(2520336): a, c, g or t
  modified_base (2521235)..(2521236): a, c, g or t
  modified_base (2522202)..(2522202): a, c, g or t
  modified_base (2522561)..(2522561): a, c, g or t
  modified_base (2523106)..(2523107): a, c, g or t
  modified_base (2523255)..(2523256): a, c, g or t
  modified_base (2523262)..(2523264): a, c, g or t
  modified_base (2523312)..(2523314): a, c, g or t
  modified_base (2523316)..(2523317): a, c, g or t
  modified_base (2523325)..(2523326): a, c, g or t
  modified_base (2524131)..(2524131): a, c, g or t
  modified_base (2524560)..(2524566): a, c, g or t
  modified_base (2524687)..(2524690): a, c, g or t
  modified_base (2525207)..(2525207): a, c, g or t
  modified_base (2525681)..(2525681): a, c, g or t
  modified_base (2526598)..(2526598): a, c, g or t
  modified_base (2526672)..(2526677): a, c, g or t
  modified_base (2528643)..(2528643): a, c, g or t
  modified_base (2528679)..(2528725): a, c, g or t
  modified_base (2528768)..(2528769): a, c, g or t
  modified_base (2528773)..(2528774): a, c, g or t
  modified_base (2529244)..(2529244): a, c, g or t
  modified_base (2530175)..(2530175): a, c, g or t
  modified_base (2531843)..(2531843): a, c, g or t
  modified_base (2532702)..(2532702): a, c, g or t
  modified_base (2533937)..(2533937): a, c, g or t
  modified_base (2533967)..(2533967): a, c, g or t
  modified_base (2534196)..(2534196): a, c, g or t
  modified_base (2535136)..(2535136): a, c, g or t
  modified_base (2535140)..(2535141): a, c, g or t
  modified_base (2535147)..(2535148): a, c, g or t
  modified_base (2535213)..(2535213): a, c, g or t
  modified_base (2535217)..(2535218): a, c, g or t
  modified_base (2535220)..(2535221): a, c, g or t
  modified_base (2535225)..(2535228): a, c, g or t
  modified_base (2535318)..(2535321): a, c, g or t
  modified_base (2535357)..(2535357): a, c, g or t
  modified_base (2535360)..(2535360): a, c, g or t
  modified_base (2535364)..(2535376): a, c, g or t
  modified_base (2535575)..(2535614): a, c, g or t
  modified_base (2535616)..(2535617): a, c, g or t
  modified_base (2535671)..(2535672): a, c, g or t
  modified_base (2535678)..(2535728): a, c, g or t
  modified_base (2535739)..(2535740): a, c, g or t
  modified_base (2535743)..(2535744): a, c, g or t
  modified_base (2535752)..(2535773): a, c, g or t
  modified_base (2535775)..(2535776): a, c, g or t
  modified_base (2535780)..(2535781): a, c, g or t
  modified_base (2535796)..(2535797): a, c, g or t
  modified_base (2535803)..(2535804): a, c, g or t
  modified_base (2535817)..(2535819): a, c, g or t
  modified_base (2535867)..(2535934): a, c, g or t
  modified_base (2535941)..(2535941): a, c, g or t
  modified_base (2535958)..(2536043): a, c, g or t
  modified_base (2536795)..(2536795): a, c, g or t
  modified_base (2537967)..(2537970): a, c, g or t
  modified_base (2538177)..(2538181): a, c, g or t
  modified_base (2538363)..(2538366): a, c, g or t
  modified_base (2538433)..(2538433): a, c, g or t
  modified_base (2539027)..(2539028): a, c, g or t
  modified_base (2539599)..(2539599): a, c, g or t
  modified_base (2540057)..(2540061): a, c, g or t
  modified_base (2540756)..(2540759): a, c, g or t
  modified_base (2541642)..(2541642): a, c, g or t
  modified_base (2541705)..(2541705): a, c, g or t
  modified_base (2544698)..(2544701): a, c, g or t
  modified_base (2545215)..(2545218): a, c, g or t
  modified_base (2545817)..(2545817): a, c, g or t
  modified_base (2545890)..(2545891): a, c, g or t
  modified_base (2548138)..(2548141): a, c, g or t
  modified_base (2548176)..(2548179): a, c, g or t
  modified_base (2548537)..(2548538): a, c, g or t
  modified_base (2548885)..(2548885): a, c, g or t
  modified_base (2548911)..(2548911): a, c, g or t
  modified_base (2548933)..(2548952): a, c, g or t
  modified_base (2549421)..(2549424): a, c, g or t
  modified_base (2549629)..(2549629): a, c, g or t
  modified_base (2549790)..(2549834): a, c, g or t
  modified_base (2549933)..(2549938): a, c, g or t
  modified_base (2549940)..(2549988): a, c, g or t
  modified_base (2550040)..(2550040): a, c, g or t
  modified_base (2550082)..(2550082): a, c, g or t
  modified_base (2550112)..(2550112): a, c, g or t
  modified_base (2550161)..(2550161): a, c, g or t
  modified_base (2550188)..(2550188): a, c, g or t
  modified_base (2550219)..(2550219): a, c, g or t
  modified_base (2550287)..(2550287): a, c, g or t
  modified_base (2550314)..(2550314): a, c, g or t
  modified_base (2550343)..(2550343): a, c, g or t
  modified_base (2550446)..(2550454): a, c, g or t
  modified_base (2550529)..(2550530): a, c, g or t
  modified_base (2550707)..(2550707): a, c, g or t
  modified_base (2550709)..(2550729): a, c, g or t
  modified_base (2550760)..(2550761): a, c, g or t
  modified_base (2550764)..(2550804): a, c, g or t
  modified_base (2550883)..(2550886): a, c, g or t
  modified_base (2550888)..(2550891): a, c, g or t
  modified_base (2550893)..(2550893): a, c, g or t
  modified_base (2550929)..(2550973): a, c, g or t
  modified_base (2551023)..(2551025): a, c, g or t
  modified_base (2551068)..(2551071): a, c, g or t
  modified_base (2551096)..(2551097): a, c, g or t
  modified_base (2551110)..(2551110): a, c, g or t
  modified_base (2551137)..(2551137): a, c, g or t
  modified_base (2551182)..(2551182): a, c, g or t
  modified_base (2551212)..(2551263): a, c, g or t
  modified_base (2551297)..(2551340): a, c, g or t
  modified_base (2551342)..(2551344): a, c, g or t
  modified_base (2551368)..(2551369): a, c, g or t
  modified_base (2551371)..(2551373): a, c, g or t
  modified_base (2551406)..(2551461): a, c, g or t
  modified_base (2551507)..(2551508): a, c, g or t
  modified_base (2551511)..(2551513): a, c, g or t
  modified_base (2551543)..(2551551): a, c, g or t
  modified_base (2551557)..(2551559): a, c, g or t
  modified_base (2551578)..(2551579): a, c, g or t
  modified_base (2551632)..(2551633): a, c, g or t
  modified_base (2551638)..(2551667): a, c, g or t
  modified_base (2551669)..(2551670): a, c, g or t
  modified_base (2551695)..(2551784): a, c, g or t
  modified_base (2551800)..(2551800): a, c, g or t
  modified_base (2551826)..(2551840): a, c, g or t
  modified_base (2551864)..(2551864): a, c, g or t
  modified_base (2551867)..(2551868): a, c, g or t
  modified_base (2551886)..(2551887): a, c, g or t
  modified_base (2551940)..(2551941): a, c, g or t
  modified_base (2551943)..(2551944): a, c, g or t
  modified_base (2551947)..(2551950): a, c, g or t
  modified_base (2551969)..(2551990): a, c, g or t
  modified_base (2552015)..(2552021): a, c, g or t
  modified_base (2552024)..(2552025): a, c, g or t
  modified_base (2552042)..(2552050): a, c, g or t
  modified_base (2552174)..(2552174): a, c, g or t
  modified_base (2552203)..(2552203): a, c, g or t
  modified_base (2552257)..(2552257): a, c, g or t
  modified_base (2552270)..(2552270): a, c, g or t
  modified_base (2552304)..(2552305): a, c, g or t
  modified_base (2552309)..(2552310): a, c, g or t
  modified_base (2552314)..(2552315): a, c, g or t
  modified_base (2552317)..(2552371): a, c, g or t
  modified_base (2552410)..(2552410): a, c, g or t
  modified_base (2552414)..(2552414): a, c, g or t
  modified_base (2552436)..(2552438): a, c, g or t
  modified_base (2552474)..(2552474): a, c, g or t
  modified_base (2552492)..(2552492): a, c, g or t
  modified_base (2552514)..(2552514): a, c, g or t
  modified_base (2552581)..(2552581): a, c, g or t
  modified_base (2552674)..(2552674): a, c, g or t
  modified_base (2552719)..(2552719): a, c, g or t
  modified_base (2552740)..(2552740): a, c, g or t
  modified_base (2552968)..(2552968): a, c, g or t
  modified_base (2552973)..(2552975): a, c, g or t
  modified_base (2553106)..(2553111): a, c, g or t
  modified_base (2553115)..(2553162): a, c, g or t
  modified_base (2553203)..(2553206): a, c, g or t
  modified_base (2553209)..(2553209): a, c, g or t
  modified_base (2553318)..(2553422): a, c, g or t
  modified_base (2553446)..(2553446): a, c, g or t
  modified_base (2553471)..(2553471): a, c, g or t
  modified_base (2553482)..(2553520): a, c, g or t
  modified_base (2553593)..(2553602): a, c, g or t
  modified_base (2553609)..(2553610): a, c, g or t
  modified_base (2553655)..(2553700): a, c, g or t
  modified_base (2553750)..(2553750): a, c, g or t
  modified_base (2553770)..(2553773): a, c, g or t
  modified_base (2553783)..(2553787): a, c, g or t
  modified_base (2553872)..(2553872): a, c, g or t
  modified_base (2553877)..(2553878): a, c, g or t
  modified_base (2553917)..(2553920): a, c, g or t
  modified_base (2553925)..(2553942): a, c, g or t
  modified_base (2554019)..(2554021): a, c, g or t
  modified_base (2554109)..(2554109): a, c, g or t
  modified_base (2554116)..(2554135): a, c, g or t
  modified_base (2554193)..(2554230): a, c, g or t
  modified_base (2554324)..(2554330): a, c, g or t
  modified_base (2554334)..(2554335): a, c, g or t
  modified_base (2554422)..(2554422): a, c, g or t
  modified_base (2554427)..(2554429): a, c, g or t
  modified_base (2554616)..(2554617): a, c, g or t
  modified_base (2554629)..(2554629): a, c, g or t
  modified_base (2554665)..(2554666): a, c, g or t
  modified_base (2554673)..(2554697): a, c, g or t
  modified_base (2554709)..(2554710): a, c, g or t
  modified_base (2554721)..(2554733): a, c, g or t
  modified_base (2554749)..(2554750): a, c, g or t
  modified_base (2554779)..(2554781): a, c, g or t
  modified_base (2554783)..(2554783): a, c, g or t
  modified_base (2554795)..(2554795): a, c, g or t
  modified_base (2554878)..(2554878): a, c, g or t
  modified_base (2554965)..(2554965): a, c, g or t
  modified_base (2555022)..(2555029): a, c, g or t
  modified_base (2555055)..(2555055): a, c, g or t
  modified_base (2555058)..(2555058): a, c, g or t
  modified_base (2555166)..(2555166): a, c, g or t
  modified_base (2555175)..(2555175): a, c, g or t
  modified_base (2555392)..(2555395): a, c, g or t
  modified_base (2555402)..(2555445): a, c, g or t
  modified_base (2555528)..(2555572): a, c, g or t
  modified_base (2555598)..(2555598): a, c, g or t
  modified_base (2555621)..(2555621): a, c, g or t
  modified_base (2555630)..(2555630): a, c, g or t
  modified_base (2555637)..(2555637): a, c, g or t
  modified_base (2555754)..(2555754): a, c, g or t
  modified_base (2555757)..(2555757): a, c, g or t
  modified_base (2555779)..(2555822): a, c, g or t
  modified_base (2555824)..(2555824): a, c, g or t
  modified_base (2555854)..(2555854): a, c, g or t
  modified_base (2555873)..(2555914): a, c, g or t
  modified_base (2556000)..(2556002): a, c, g or t
  modified_base (2556161)..(2556167): a, c, g or t
  modified_base (2556273)..(2556273): a, c, g or t
  modified_base (2556276)..(2556374): a, c, g or t
  modified_base (2556506)..(2556508): a, c, g or t
  modified_base (2556703)..(2556703): a, c, g or t
  modified_base (2556758)..(2556758): a, c, g or t
  modified_base (2556768)..(2556768): a, c, g or t
  modified_base (2556793)..(2556857): a, c, g or t
  modified_base (2556884)..(2556937): a, c, g or t
  modified_base (2556943)..(2556943): a, c, g or t
  modified_base (2556953)..(2556954): a, c, g or t
  modified_base (2556965)..(2556966): a, c, g or t
  modified_base (2556973)..(2556973): a, c, g or t
  modified_base (2556982)..(2556982): a, c, g or t
  modified_base (2556985)..(2556986): a, c, g or t
  modified_base (2556993)..(2557001): a, c, g or t
  modified_base (2557030)..(2557074): a, c, g or t
  modified_base (2557140)..(2557246): a, c, g or t
  modified_base (2557249)..(2557250): a, c, g or t
  modified_base (2557331)..(2557331): a, c, g or t
  modified_base (2557344)..(2557345): a, c, g or t
  modified_base (2557349)..(2557350): a, c, g or t
  modified_base (2557358)..(2557424): a, c, g or t
  modified_base (2557501)..(2557502): a, c, g or t
  modified_base (2557595)..(2557730): a, c, g or t
  modified_base (2557744)..(2557744): a, c, g or t
  modified_base (2557760)..(2557780): a, c, g or t
  modified_base (2557835)..(2557841): a, c, g or t
  modified_base (2557844)..(2557844): a, c, g or t
  modified_base (2557866)..(2557867): a, c, g or t
  modified_base (2557913)..(2557913): a, c, g or t
  modified_base (2557928)..(2557928): a, c, g or t
  modified_base (2557946)..(2557947): a, c, g or t
  modified_base (2558002)..(2558002): a, c, g or t
  modified_base (2558048)..(2558089): a, c, g or t
  modified_base (2558117)..(2558117): a, c, g or t
  modified_base (2558125)..(2558139): a, c, g or t
  modified_base (2558192)..(2558233): a, c, g or t
  modified_base (2558245)..(2558245): a, c, g or t
  modified_base (2558319)..(2558321): a, c, g or t
  modified_base (2558323)..(2558323): a, c, g or t
  modified_base (2558338)..(2558338): a, c, g or t
  modified_base (2558375)..(2558417): a, c, g or t
  modified_base (2558445)..(2558445): a, c, g or t
  modified_base (2558499)..(2558550): a, c, g or t
  modified_base (2558594)..(2558595): a, c, g or t
  modified_base (2558599)..(2558601): a, c, g or t
  modified_base (2558603)..(2558648): a, c, g or t
  modified_base (2558650)..(2558651): a, c, g or t
  modified_base (2558662)..(2558662): a, c, g or t
  modified_base (2558669)..(2558707): a, c, g or t
  modified_base (2558753)..(2558793): a, c, g or t
  modified_base (2558894)..(2558894): a, c, g or t
  modified_base (2558903)..(2558946): a, c, g or t
  modified_base (2558971)..(2558971): a, c, g or t
  modified_base (2558973)..(2559014): a, c, g or t
  modified_base (2559062)..(2559101): a, c, g or t
  modified_base (2559151)..(2559151): a, c, g or t
  modified_base (2559193)..(2559196): a, c, g or t
  modified_base (2559348)..(2559352): a, c, g or t
  modified_base (2559355)..(2559392): a, c, g or t
  modified_base (2559394)..(2559394): a, c, g or t
  modified_base (2559421)..(2559421): a, c, g or t
  modified_base (2559442)..(2559483): a, c, g or t
  modified_base (2559509)..(2559512): a, c, g or t
  modified_base (2559518)..(2559576): a, c, g or t
  modified_base (2559606)..(2559608): a, c, g or t
  modified_base (2559612)..(2559655): a, c, g or t
  modified_base (2559712)..(2559753): a, c, g or t
  modified_base (2559774)..(2559813): a, c, g or t
  modified_base (2559861)..(2559861): a, c, g or t
  modified_base (2559952)..(2559952): a, c, g or t
  modified_base (2559961)..(2560000): a, c, g or t
  modified_base (2560223)..(2560224): a, c, g or t
  modified_base (2560226)..(2560227): a, c, g or t
  modified_base (2560229)..(2560281): a, c, g or t
  modified_base (2560304)..(2560345): a, c, g or t
  modified_base (2560348)..(2560348): a, c, g or t
  modified_base (2560376)..(2560420): a, c, g or t
  modified_base (2560479)..(2560520): a, c, g or t
  modified_base (2560657)..(2560662): a, c, g or t
  modified_base (2561599)..(2561600): a, c, g or t
  modified_base (2561992)..(2561995): a, c, g or t
  modified_base (2561997)..(2561998): a, c, g or t
  modified_base (2562007)..(2562008): a, c, g or t
  modified_base (2562012)..(2562013): a, c, g or t
  modified_base (2562188)..(2562188): a, c, g or t
  modified_base (2562193)..(2562232): a, c, g or t
  modified_base (2562876)..(2562877): a, c, g or t
  modified_base (2562996)..(2563035): a, c, g or t
  modified_base (2563204)..(2563250): a, c, g or t
  modified_base (2563325)..(2563329): a, c, g or t
  modified_base (2563365)..(2563406): a, c, g or t
  modified_base (2563426)..(2563466): a, c, g or t
  modified_base (2563512)..(2563512): a, c, g or t
  modified_base (2563519)..(2563559): a, c, g or t
  modified_base (2563563)..(2563563): a, c, g or t
  modified_base (2563588)..(2563627): a, c, g or t
  modified_base (2563658)..(2563697): a, c, g or t
  modified_base (2563814)..(2563817): a, c, g or t
  modified_base (2563938)..(2563946): a, c, g or t
  modified_base (2563949)..(2563952): a, c, g or t
  modified_base (2564003)..(2564006): a, c, g or t
  modified_base (2564014)..(2564079): a, c, g or t
  modified_base (2564203)..(2564242): a, c, g or t
  modified_base (2564264)..(2564313): a, c, g or t
  modified_base (2564343)..(2564346): a, c, g or t
  modified_base (2564382)..(2564383): a, c, g or t
  modified_base (2564387)..(2564396): a, c, g or t
  modified_base (2564441)..(2564491): a, c, g or t
  modified_base (2564524)..(2564565): a, c, g or t
  modified_base (2564611)..(2564652): a, c, g or t
  modified_base (2564658)..(2564660): a, c, g or t
  modified_base (2564676)..(2564677): a, c, g or t
  modified_base (2564778)..(2564836): a, c, g or t
  modified_base (2564903)..(2564951): a, c, g or t
  modified_base (2564953)..(2564954): a, c, g or t
  modified_base (2564973)..(2565039): a, c, g or t
  modified_base (2565081)..(2565082): a, c, g or t
  modified_base (2565115)..(2565115): a, c, g or t
  modified_base (2565143)..(2565145): a, c, g or t
  modified_base (2565148)..(2565149): a, c, g or t
  modified_base (2565166)..(2565175): a, c, g or t
  modified_base (2565202)..(2565249): a, c, g or t
  modified_base (2565287)..(2565326): a, c, g or t
  modified_base (2565362)..(2565363): a, c, g or t
  modified_base (2565371)..(2565433): a, c, g or t
  modified_base (2565461)..(2565461): a, c, g or t
  modified_base (2565470)..(2565474): a, c, g or t
  modified_base (2565517)..(2565561): a, c, g or t
  modified_base (2565612)..(2572472): a, c, g or t
  modified_base (2572475)..(2572475): a, c, g or t
  modified_base (2572541)..(2572554): a, c, g or t
  modified_base (2572565)..(2572566): a, c, g or t
  modified_base (2572594)..(2572665): a, c, g or t
  modified_base (2572709)..(2572710): a, c, g or t
  modified_base (2572712)..(2572787): a, c, g or t
  modified_base (2572810)..(2572811): a, c, g or t
  modified_base (2572855)..(2572894): a, c, g or t
  modified_base (2572918)..(2572966): a, c, g or t
  modified_base (2572976)..(2572976): a, c, g or t
  modified_base (2572994)..(2573011): a, c, g or t
  modified_base (2573025)..(2573026): a, c, g or t
  modified_base (2573060)..(2573077): a, c, g or t
  modified_base (2573116)..(2573118): a, c, g or t
  modified_base (2573123)..(2573123): a, c, g or t
  modified_base (2573149)..(2573214): a, c, g or t
  modified_base (2573238)..(2573314): a, c, g or t
  modified_base (2573316)..(2573316): a, c, g or t
  modified_base (2573347)..(2573403): a, c, g or t
  modified_base (2573482)..(2573484): a, c, g or t
  modified_base (2573573)..(2573573): a, c, g or t
  modified_base (2573587)..(2573587): a, c, g or t
  modified_base (2573589)..(2573590): a, c, g or t
  modified_base (2573621)..(2573621): a, c, g or t
  modified_base (2573652)..(2573652): a, c, g or t
  modified_base (2573662)..(2573662): a, c, g or t
  modified_base (2573667)..(2573667): a, c, g or t
  modified_base (2573674)..(2573674): a, c, g or t
  modified_base (2573770)..(2573770): a, c, g or t
  modified_base (2573803)..(2573806): a, c, g or t
  modified_base (2573854)..(2573858): a, c, g or t
  modified_base (2573892)..(2573937): a, c, g or t
  modified_base (2573943)..(2573943): a, c, g or t
  modified_base (2573957)..(2573966): a, c, g or t
  modified_base (2573980)..(2573980): a, c, g or t
  modified_base (2574111)..(2574156): a, c, g or t
  modified_base (2574204)..(2574204): a, c, g or t
  modified_base (2574207)..(2574208): a, c, g or t
  modified_base (2574220)..(2574248): a, c, g or t
  modified_base (2574292)..(2574353): a, c, g or t
  modified_base (2574405)..(2574405): a, c, g or t
  modified_base (2574432)..(2574474): a, c, g or t
  modified_base (2574482)..(2574482): a, c, g or t
  modified_base (2574533)..(2574533): a, c, g or t
  modified_base (2574548)..(2574548): a, c, g or t
  modified_base (2574557)..(2574557): a, c, g or t
  modified_base (2574583)..(2574620): a, c, g or t
  modified_base (2574629)..(2574629): a, c, g or t
  modified_base (2574641)..(2574682): a, c, g or t
  modified_base (2574727)..(2574777): a, c, g or t
  modified_base (2574827)..(2574827): a, c, g or t
  modified_base (2574846)..(2574846): a, c, g or t
  modified_base (2574901)..(2574940): a, c, g or t
  modified_base (2574968)..(2574968): a, c, g or t
  modified_base (2575019)..(2575020): a, c, g or t
  modified_base (2575115)..(2575155): a, c, g or t
  modified_base (2575205)..(2575208): a, c, g or t
  modified_base (2575336)..(2575377): a, c, g or t
  modified_base (2575444)..(2575487): a, c, g or t
  modified_base (2575593)..(2575593): a, c, g or t
  modified_base (2575685)..(2575726): a, c, g or t
  modified_base (2575803)..(2575842): a, c, g or t
  modified_base (2575945)..(2575948): a, c, g or t
  modified_base (2575954)..(2575957): a, c, g or t
  modified_base (2575981)..(2576022): a, c, g or t
  modified_base (2576051)..(2576051): a, c, g or t
  modified_base (2576192)..(2576198): a, c, g or t
  modified_base (2576200)..(2576232): a, c, g or t
  modified_base (2576240)..(2576241): a, c, g or t
  modified_base (2576308)..(2576351): a, c, g or t
  modified_base (2576403)..(2576416): a, c, g or t
  modified_base (2576444)..(2576444): a, c, g or t
  modified_base (2576448)..(2576485): a, c, g or t
  modified_base (2576786)..(2576802): a, c, g or t
  modified_base (2576885)..(2576885): a, c, g or t
  modified_base (2576918)..(2576966): a, c, g or t
  modified_base (2576972)..(2576973): a, c, g or t
  modified_base (2576983)..(2576983): a, c, g or t
  modified_base (2576989)..(2576991): a, c, g or t
  modified_base (2577002)..(2577002): a, c, g or t
  modified_base (2577065)..(2577065): a, c, g or t
  modified_base (2577092)..(2577092): a, c, g or t
  modified_base (2577223)..(2577223): a, c, g or t
  modified_base (2577281)..(2577282): a, c, g or t
  modified_base (2577353)..(2577353): a, c, g or t
  modified_base (2577356)..(2577394): a, c, g or t
  modified_base (2577405)..(2577408): a, c, g or t
  modified_base (2577418)..(2577490): a, c, g or t
  modified_base (2577502)..(2577502): a, c, g or t
  modified_base (2577605)..(2577656): a, c, g or t
  modified_base (2577720)..(2577761): a, c, g or t
  modified_base (2577789)..(2577793): a, c, g or t
  modified_base (2577812)..(2577813): a, c, g or t
  modified_base (2577816)..(2577820): a, c, g or t
  modified_base (2577822)..(2577867): a, c, g or t
  modified_base (2577879)..(2577880): a, c, g or t
  modified_base (2577939)..(2577998): a, c, g or t
  modified_base (2578029)..(2578033): a, c, g or t
  modified_base (2578077)..(2578121): a, c, g or t
  modified_base (2578179)..(2578220): a, c, g or t
  modified_base (2578244)..(2578388): a, c, g or t
  modified_base (2578414)..(2578453): a, c, g or t
  modified_base (2578474)..(2578513): a, c, g or t
  modified_base (2578553)..(2578553): a, c, g or t
  modified_base (2578589)..(2578589): a, c, g or t
  modified_base (2578610)..(2578613): a, c, g or t
  modified_base (2578660)..(2578663): a, c, g or t
  modified_base (2578691)..(2578691): a, c, g or t
  modified_base (2578723)..(2578762): a, c, g or t
  modified_base (2578794)..(2578834): a, c, g or t
  modified_base (2578979)..(2578979): a, c, g or t
  modified_base (2579009)..(2579048): a, c, g or t
  modified_base (2579053)..(2579053): a, c, g or t
  modified_base (2579210)..(2579210): a, c, g or t
  modified_base (2579235)..(2579235): a, c, g or t
  modified_base (2579237)..(2579277): a, c, g or t
  modified_base (2579327)..(2579366): a, c, g or t
  modified_base (2579390)..(2579431): a, c, g or t
  modified_base (2579521)..(2579521): a, c, g or t
  modified_base (2579619)..(2579656): a, c, g or t
  modified_base (2579676)..(2579722): a, c, g or t
  modified_base (2579751)..(2579751): a, c, g or t
  modified_base (2579778)..(2579816): a, c, g or t
  modified_base (2579908)..(2579947): a, c, g or t
  modified_base (2579968)..(2580009): a, c, g or t
  modified_base (2580084)..(2580123): a, c, g or t
  modified_base (2580174)..(2580174): a, c, g or t
  modified_base (2580178)..(2580220): a, c, g or t
  modified_base (2580319)..(2580356): a, c, g or t
  modified_base (2580380)..(2580422): a, c, g or t
  modified_base (2580460)..(2580460): a, c, g or t
  modified_base (2580559)..(2580598): a, c, g or t
  modified_base (2580703)..(2580706): a, c, g or t
  modified_base (2580751)..(2580793): a, c, g or t
  modified_base (2580838)..(2580838): a, c, g or t
  modified_base (2581117)..(2581156): a, c, g or t
  modified_base (2581246)..(2581287): a, c, g or t
  modified_base (2581947)..(2581953): a, c, g or t
  modified_base (2582276)..(2582277): a, c, g or t
  modified_base (2582287)..(2582288): a, c, g or t
  modified_base (2583843)..(2583844): a, c, g or t
  modified_base (2583846)..(2583848): a, c, g or t
  modified_base (2583914)..(2583915): a, c, g or t
  modified_base (2583917)..(2583919): a, c, g or t
  modified_base (2583921)..(2583924): a, c, g or t
  modified_base (2583956)..(2583957): a, c, g or t
  modified_base (2583963)..(2583971): a, c, g or t
  modified_base (2584038)..(2584059): a, c, g or t
  modified_base (2584061)..(2584064): a, c, g or t
  modified_base (2584083)..(2584134): a, c, g or t
  modified_base (2584164)..(2584167): a, c, g or t
  modified_base (2584231)..(2584232): a, c, g or t
  modified_base (2584236)..(2584237): a, c, g or t
  modified_base (2584239)..(2584240): a, c, g or t
  modified_base (2584271)..(2584288): a, c, g or t
  modified_base (2584330)..(2584343): a, c, g or t
  modified_base (2584366)..(2584399): a, c, g or t
  modified_base (2584420)..(2584421): a, c, g or t
  modified_base (2584423)..(2584426): a, c, g or t
  modified_base (2584429)..(2584429): a, c, g or t
  modified_base (2584445)..(2584446): a, c, g or t
  modified_base (2584450)..(2585393): a, c, g or t
  modified_base (2585398)..(2585400): a, c, g or t
  modified_base (2585409)..(2585410): a, c, g or t
  modified_base (2585417)..(2585463): a, c, g or t
  modified_base (2585465)..(2585466): a, c, g or t
  modified_base (2585487)..(2585859): a, c, g or t
  modified_base (2585868)..(2585869): a, c, g or t
  modified_base (2585871)..(2585872): a, c, g or t
  modified_base (2585883)..(2586004): a, c, g or t
  modified_base (2586025)..(2586026): a, c, g or t
  modified_base (2586028)..(2586036): a, c, g or t
  modified_base (2586060)..(2586096): a, c, g or t
  modified_base (2586098)..(2586099): a, c, g or t
  modified_base (2586114)..(2586115): a, c, g or t
  modified_base (2586120)..(2586153): a, c, g or t
  modified_base (2586207)..(2586223): a, c, g or t
  modified_base (2586227)..(2586228): a, c, g or t
  modified_base (2586230)..(2586231): a, c, g or t
  modified_base (2586236)..(2586237): a, c, g or t
  modified_base (2586245)..(2586248): a, c, g or t
  modified_base (2586272)..(2586497): a, c, g or t
  modified_base (2586511)..(2586512): a, c, g or t
  modified_base (2586521)..(2586647): a, c, g or t
  modified_base (2586671)..(2586738): a, c, g or t
  modified_base (2586740)..(2586741): a, c, g or t
  modified_base (2586761)..(2587455): a, c, g or t
  modified_base (2587479)..(2587864): a, c, g or t
  modified_base (2587866)..(2587867): a, c, g or t
  modified_base (2587888)..(2588080): a, c, g or t
  modified_base (2588082)..(2588083): a, c, g or t
  modified_base (2588085)..(2588085): a, c, g or t
  modified_base (2588104)..(2588147): a, c, g or t
  modified_base (2588171)..(2588342): a, c, g or t
  modified_base (2588351)..(2588354): a, c, g or t
  modified_base (2588366)..(2588397): a, c, g or t
  modified_base (2588402)..(2588402): a, c, g or t
  modified_base (2588421)..(2588485): a, c, g or t
  modified_base (2588514)..(2588518): a, c, g or t
  modified_base (2588523)..(2588524): a, c, g or t
  modified_base (2588545)..(2588545): a, c, g or t
  modified_base (2588547)..(2588548): a, c, g or t
  modified_base (2588552)..(2588555): a, c, g or t
  modified_base (2588557)..(2588570): a, c, g or t
  modified_base (2588603)..(2588609): a, c, g or t
  modified_base (2588611)..(2588612): a, c, g or t
  modified_base (2588615)..(2588616): a, c, g or t
  modified_base (2588643)..(2588697): a, c, g or t
  modified_base (2588755)..(2588755): a, c, g or t
  modified_base (2588802)..(2588842): a, c, g or t
  modified_base (2588949)..(2588952): a, c, g or t
  modified_base (2589014)..(2589053): a, c, g or t
  modified_base (2589098)..(2589098): a, c, g or t
  modified_base (2589107)..(2589107): a, c, g or t
  modified_base (2589133)..(2589134): a, c, g or t
  modified_base (2589136)..(2589175): a, c, g or t
  modified_base (2589824)..(2589832): a, c, g or t
  modified_base (2590717)..(2590717): a, c, g or t
  modified_base (2591269)..(2591269): a, c, g or t
  modified_base (2591496)..(2591498): a, c, g or t
  modified_base (2591858)..(2591862): a, c, g or t
  modified_base (2592266)..(2592266): a, c, g or t
  modified_base (2595465)..(2595465): a, c, g or t
  modified_base (2595887)..(2595887): a, c, g or t
  modified_base (2596133)..(2596136): a, c, g or t
  modified_base (2597686)..(2597686): a, c, g or t
  modified_base (2600297)..(2600300): a, c, g or t
  modified_base (2600698)..(2600698): a, c, g or t
  modified_base (2601344)..(2601347): a, c, g or t
  modified_base (2602650)..(2602650): a, c, g or t
  modified_base (2603784)..(2603784): a, c, g or t
  modified_base (2604546)..(2604546): a, c, g or t
  modified_base (2604621)..(2604621): a, c, g or t
  modified_base (2604735)..(2604735): a, c, g or t
  modified_base (2605398)..(2605398): a, c, g or t
  modified_base (2605651)..(2605651): a, c, g or t
  modified_base (2606680)..(2606680): a, c, g or t
  modified_base (2607538)..(2607538): a, c, g or t
  modified_base (2607545)..(2607545): a, c, g or t
  modified_base (2607887)..(2607887): a, c, g or t
  modified_base (2608235)..(2608238): a, c, g or t
  modified_base (2612712)..(2612712): a, c, g or t
  modified_base (2615293)..(2615293): a, c, g or t
  modified_base (2615874)..(2615874): a, c, g or t
  modified_base (2616178)..(2616178): a, c, g or t
  modified_base (2616264)..(2616271): a, c, g or t
  modified_base (2616937)..(2616937): a, c, g or t
  modified_base (2619084)..(2619084): a, c, g or t
  modified_base (2620102)..(2620102): a, c, g or t
  modified_base (2620104)..(2620105): a, c, g or t
  modified_base (2620125)..(2620126): a, c, g or t
  modified_base (2620313)..(2620313): a, c, g or t
  modified_base (2620998)..(2620998): a, c, g or t
  modified_base (2621461)..(2621461): a, c, g or t
  modified_base (2622781)..(2622784): a, c, g or t
  modified_base (2623968)..(2623971): a, c, g or t
  modified_base (2624056)..(2624060): a, c, g or t
  modified_base (2624064)..(2624064): a, c, g or t
  modified_base (2625919)..(2625927): a, c, g or t
  modified_base (2627617)..(2627617): a, c, g or t
  modified_base (2628955)..(2628955): a, c, g or t
  modified_base (2631808)..(2631808): a, c, g or t
  modified_base (2634102)..(2634108): a, c, g or t
  modified_base (2634126)..(2634126): a, c, g or t
  modified_base (2634475)..(2634475): a, c, g or t
  modified_base (2634996)..(2634996): a, c, g or t
  modified_base (2635588)..(2635588): a, c, g or t
  modified_base (2635685)..(2635685): a, c, g or t
  modified_base (2638818)..(2638818): a, c, g or t
  modified_base (2641438)..(2641439): a, c, g or t
  modified_base (2641442)..(2641442): a, c, g or t
  modified_base (2641693)..(2641693): a, c, g or t
  modified_base (2641700)..(2641701): a, c, g or t
  modified_base (2646238)..(2646238): a, c, g or t
  modified_base (2653096)..(2653096): a, c, g or t
  modified_base (2653412)..(2653415): a, c, g or t
  modified_base (2654095)..(2654100): a, c, g or t
  modified_base (2655196)..(2655196): a, c, g or t
  modified_base (2657335)..(2657335): a, c, g or t
  modified_base (2658189)..(2658189): a, c, g or t
  modified_base (2658679)..(2658679): a, c, g or t
  modified_base (2660753)..(2660753): a, c, g or t
  modified_base (2660845)..(2660845): a, c, g or t
  modified_base (2662287)..(2662287): a, c, g or t
  modified_base (2663867)..(2663867): a, c, g or t
  modified_base (2665769)..(2665770): a, c, g or t
  modified_base (2666365)..(2666365): a, c, g or t
  modified_base (2667092)..(2667095): a, c, g or t
  modified_base (2669279)..(2669279): a, c, g or t
  modified_base (2671111)..(2671111): a, c, g or t
  modified_base (2672465)..(2672468): a, c, g or t
  modified_base (2673824)..(2673824): a, c, g or t
  modified_base (2674550)..(2674553): a, c, g or t
  modified_base (2675028)..(2675034): a, c, g or t
  modified_base (2677550)..(2677550): a, c, g or t
  modified_base (2677807)..(2677807): a, c, g or t
  modified_base (2678761)..(2678761): a, c, g or t
  modified_base (2679936)..(2679936): a, c, g or t
  modified_base (2680399)..(2680399): a, c, g or t
  modified_base (2680448)..(2680448): a, c, g or t
  modified_base (2681185)..(2681185): a, c, g or t
  modified_base (2682659)..(2682666): a, c, g or t
  modified_base (2683174)..(2683174): a, c, g or t
  modified_base (2684221)..(2684221): a, c, g or t
  modified_base (2687017)..(2687017): a, c, g or t
  modified_base (2688299)..(2688302): a, c, g or t
  modified_base (2688304)..(2688305): a, c, g or t
  modified_base (2688407)..(2688407): a, c, g or t
  modified_base (2694913)..(2694916): a, c, g or t
  modified_base (2696249)..(2696249): a, c, g or t
  modified_base (2696633)..(2696638): a, c, g or t
  modified_base (2698225)..(2698225): a, c, g or t
  modified_base (2699078)..(2699078): a, c, g or t
  modified_base (2700464)..(2700464): a, c, g or t
  modified_base (2702574)..(2702574): a, c, g or t
  modified_base (2702781)..(2702781): a, c, g or t
  modified_base (2703230)..(2703230): a, c, g or t
  modified_base (2703499)..(2703499): a, c, g or t
  modified_base (2703769)..(2703769): a, c, g or t
  modified_base (2704716)..(2704717): a, c, g or t
  modified_base (2704727)..(2704732): a, c, g or t
  modified_base (2705434)..(2705439): a, c, g or t
  modified_base (2706235)..(2706235): a, c, g or t
  modified_base (2706255)..(2706255): a, c, g or t
  modified_base (2708264)..(2708269): a, c, g or t
  modified_base (2708440)..(2708440): a, c, g or t
  modified_base (2709083)..(2709083): a, c, g or t
  modified_base (2709713)..(2709713): a, c, g or t
  modified_base (2710868)..(2710868): a, c, g or t
  modified_base (2711820)..(2711823): a, c, g or t
  modified_base (2712885)..(2712885): a, c, g or t
  modified_base (2713039)..(2713039): a, c, g or t
  modified_base (2713109)..(2713109): a, c, g or t
  modified_base (2713877)..(2713877): a, c, g or t
  modified_base (2716801)..(2716801): a, c, g or t
  modified_base (2717060)..(2717060): a, c, g or t
  modified_base (2717089)..(2717089): a, c, g or t
  modified_base (2722378)..(2722380): a, c, g or t
  modified_base (2722382)..(2722384): a, c, g or t
  modified_base (2726426)..(2726431): a, c, g or t
  modified_base (2726522)..(2726530): a, c, g or t
  modified_base (2726812)..(2726812): a, c, g or t
  modified_base (2729726)..(2729726): a, c, g or t
  modified_base (2730828)..(2730828): a, c, g or t
  modified_base (2731400)..(2731400): a, c, g or t
  modified_base (2731404)..(2731405): a, c, g or t
  modified_base (2731780)..(2731780): a, c, g or t
  modified_base (2732206)..(2732214): a, c, g or t
  modified_base (2732396)..(2732399): a, c, g or t
  modified_base (2734412)..(2734412): a, c, g or t
  modified_base (2734445)..(2734445): a, c, g or t
  modified_base (2736492)..(2736492): a, c, g or t
  modified_base (2742150)..(2742150): a, c, g or t
  modified_base (2743416)..(2743417): a, c, g or t
  modified_base (2743453)..(2743461): a, c, g or t
  modified_base (2744118)..(2744118): a, c, g or t
  modified_base (2744224)..(2744224): a, c, g or t
  modified_base (2746051)..(2746051): a, c, g or t
  modified_base (2748517)..(2748517): a, c, g or t
  modified_base (2751669)..(2751669): a, c, g or t
  modified_base (2752653)..(2752653): a, c, g or t
  modified_base (2753603)..(2753603): a, c, g or t
  modified_base (2754306)..(2754306): a, c, g or t
  modified_base (2754441)..(2754441): a, c, g or t
  modified_base (2754732)..(2754735): a, c, g or t
  modified_base (2755397)..(2755397): a, c, g or t
  modified_base (2755796)..(2755796): a, c, g or t
  modified_base (2755838)..(2755838): a, c, g or t
  modified_base (2755898)..(2755898): a, c, g or t
  modified_base (2756067)..(2756067): a, c, g or t
  modified_base (2756070)..(2756070): a, c, g or t
  modified_base (2757202)..(2757202): a, c, g or t
  modified_base (2757258)..(2757258): a, c, g or t
  modified_base (2758260)..(2758260): a, c, g or t
  modified_base (2759762)..(2759769): a, c, g or t
  modified_base (2760370)..(2760370): a, c, g or t
  modified_base (2762701)..(2762701): a, c, g or t
  modified_base (2763400)..(2763400): a, c, g or t
  modified_base (2763756)..(2763756): a, c, g or t
  modified_base (2765927)..(2765927): a, c, g or t
  modified_base (2772324)..(2772324): a, c, g or t
  modified_base (2772328)..(2772330): a, c, g or t
  modified_base (2773642)..(2773642): a, c, g or t
  modified_base (2774083)..(2774083): a, c, g or t
  modified_base (2775077)..(2775077): a, c, g or t
  modified_base (2775080)..(2775080): a, c, g or t
  modified_base (2775609)..(2775609): a, c, g or t
  modified_base (2776064)..(2776067): a, c, g or t
  modified_base (2777691)..(2777691): a, c, g or t
  modified_base (2778192)..(2778192): a, c, g or t
  modified_base (2778936)..(2778936): a, c, g or t
  modified_base (2782999)..(2782999): a, c, g or t
  modified_base (2783491)..(2783491): a, c, g or t
  modified_base (2784049)..(2784049): a, c, g or t
  modified_base (2786184)..(2786184): a, c, g or t
  modified_base (2787283)..(2787283): a, c, g or t
  modified_base (2787285)..(2787285): a, c, g or t
  modified_base (2789274)..(2789274): a, c, g or t
  modified_base (2791452)..(2791452): a, c, g or t
  modified_base (2792787)..(2792787): a, c, g or t
  modified_base (2794972)..(2794972): a, c, g or t
  modified_base (2797100)..(2797100): a, c, g or t
  modified_base (2798129)..(2798129): a, c, g or t
  modified_base (2798149)..(2798149): a, c, g or t
  modified_base (2798204)..(2798204): a, c, g or t
  modified_base (2798446)..(2798446): a, c, g or t
  modified_base (2799861)..(2799861): a, c, g or t
  modified_base (2804375)..(2804380): a, c, g or t
  modified_base (2804382)..(2804383): a, c, g or t
  modified_base (2804388)..(2804389): a, c, g or t
  modified_base (2804406)..(2804406): a, c, g or t
  modified_base (2804410)..(2804415): a, c, g or t
  modified_base (2804466)..(2804478): a, c, g or t
  modified_base (2804488)..(2804491): a, c, g or t
  modified_base (2804503)..(2804504): a, c, g or t
  modified_base (2804517)..(2804574): a, c, g or t
  modified_base (2804576)..(2804576): a, c, g or t
  modified_base (2804661)..(2804665): a, c, g or t
  modified_base (2804672)..(2804673): a, c, g or t
  modified_base (2804676)..(2804677): a, c, g or t
  modified_base (2805020)..(2805020): a, c, g or t
  modified_base (2805950)..(2805950): a, c, g or t
  modified_base (2806135)..(2806142): a, c, g or t
  modified_base (2807875)..(2807882): a, c, g or t
  modified_base (2807886)..(2807886): a, c, g or t
  modified_base (2809471)..(2809471): a, c, g or t
  modified_base (2809905)..(2809905): a, c, g or t
  modified_base (2810399)..(2810399): a, c, g or t
  modified_base (2810985)..(2810985): a, c, g or t
  modified_base (2813645)..(2813645): a, c, g or t
  modified_base (2813809)..(2813809): a, c, g or t
  modified_base (2814445)..(2814445): a, c, g or t
  modified_base (2815006)..(2815006): a, c, g or t
  modified_base (2815025)..(2815033): a, c, g or t
  modified_base (2815035)..(2815036): a, c, g or t
  modified_base (2819401)..(2819401): a, c, g or t
  modified_base (2820034)..(2820034): a, c, g or t
  modified_base (2820210)..(2820210): a, c, g or t
  modified_base (2820684)..(2820685): a, c, g or t
  modified_base (2820825)..(2820825): a, c, g or t
  modified_base (2822462)..(2822462): a, c, g or t
  modified_base (2822961)..(2822961): a, c, g or t
  modified_base (2826201)..(2826201): a, c, g or t
  modified_base (2826865)..(2826869): a, c, g or t
  modified_base (2826879)..(2826879): a, c, g or t
  modified_base (2827136)..(2827136): a, c, g or t
  modified_base (2828268)..(2828268): a, c, g or t
  modified_base (2828867)..(2828867): a, c, g or t
  modified_base (2833078)..(2833078): a, c, g or t
  modified_base (2833513)..(2833513): a, c, g or t
  modified_base (2836821)..(2836823): a, c, g or t
  modified_base (2839300)..(2839300): a, c, g or t
  modified_base (2840544)..(2840545): a, c, g or t
  modified_base (2842198)..(2842200): a, c, g or t
  modified_base (2844250)..(2844250): a, c, g or t
  modified_base (2847565)..(2847570): a, c, g or t
  modified_base (2850212)..(2850212): a, c, g or t
  modified_base (2851535)..(2851539): a, c, g or t
  modified_base (2851541)..(2851541): a, c, g or t
  modified_base (2851570)..(2851575): a, c, g or t
  modified_base (2851798)..(2851798): a, c, g or t
  modified_base (2851803)..(2851806): a, c, g or t
  modified_base (2851809)..(2851812): a, c, g or t
  modified_base (2852153)..(2852153): a, c, g or t
  modified_base (2853965)..(2853971): a, c, g or t
  modified_base (2853974)..(2853974): a, c, g or t
  modified_base (2854621)..(2854621): a, c, g or t
  modified_base (2857271)..(2857271): a, c, g or t
  modified_base (2857294)..(2857294): a, c, g or t
  modified_base (2857553)..(2857553): a, c, g or t
  modified_base (2859305)..(2859305): a, c, g or t
  modified_base (2859310)..(2859310): a, c, g or t
  modified_base (2859312)..(2859312): a, c, g or t
  modified_base (2859328)..(2859336): a, c, g or t
  modified_base (2859576)..(2859576): a, c, g or t
  modified_base (2859578)..(2859579): a, c, g or t
  modified_base (2860422)..(2860422): a, c, g or t
  modified_base (2861302)..(2861302): a, c, g or t
  modified_base (2863773)..(2863776): a, c, g or t
  modified_base (2864868)..(2864868): a, c, g or t
  modified_base (2866097)..(2866106): a, c, g or t
  modified_base (2866888)..(2866889): a, c, g or t
  modified_base (2866891)..(2866894): a, c, g or t
  modified_base (2867399)..(2867400): a, c, g or t
  modified_base (2867541)..(2867544): a, c, g or t
  modified_base (2867640)..(2867640): a, c, g or t
  modified_base (2867897)..(2867897): a, c, g or t
  modified_base (2869084)..(2869084): a, c, g or t
  modified_base (2869515)..(2869515): a, c, g or t
  modified_base (2869557)..(2869557): a, c, g or t
  modified_base (2869559)..(2869562): a, c, g or t
  modified_base (2870943)..(2870949): a, c, g or t
  modified_base (2871053)..(2871053): a, c, g or t
  modified_base (2873884)..(2873884): a, c, g or t
  modified_base (2873893)..(2873893): a, c, g or t
  modified_base (2873901)..(2873901): a, c, g or t
  modified_base (2874892)..(2874892): a, c, g or t
  modified_base (2876699)..(2876699): a, c, g or t
  modified_base (2876935)..(2876935): a, c, g or t
  modified_base (2878240)..(2878240): a, c, g or t
  modified_base (2880484)..(2880487): a, c, g or t
  modified_base (2880731)..(2880733): a, c, g or t
  modified_base (2883312)..(2883312): a, c, g or t
  modified_base (2883988)..(2883988): a, c, g or t
  modified_base (2887118)..(2887118): a, c, g or t
  modified_base (2887120)..(2887120): a, c, g or t
  modified_base (2889782)..(2889782): a, c, g or t
  modified_base (2890479)..(2890479): a, c, g or t
  modified_base (2892610)..(2892616): a, c, g or t
  modified_base (2893435)..(2893435): a, c, g or t
  modified_base (2893589)..(2893589): a, c, g or t
  modified_base (2894266)..(2894266): a, c, g or t
  modified_base (2896564)..(2896564): a, c, g or t
  modified_base (2896828)..(2896829): a, c, g or t
  modified_base (2896922)..(2896955): a, c, g or t
  modified_base (2897076)..(2897077): a, c, g or t
  modified_base (2900124)..(2900124): a, c, g or t
  modified_base (2900958)..(2900958): a, c, g or t
  modified_base (2901057)..(2901057): a, c, g or t
  modified_base (2901059)..(2901059): a, c, g or t
  modified_base (2901061)..(2901061): a, c, g or t
  modified_base (2901063)..(2901063): a, c, g or t
  modified_base (2902092)..(2902092): a, c, g or t
  modified_base (2902176)..(2902176): a, c, g or t
  modified_base (2902277)..(2902277): a, c, g or t
  modified_base (2902698)..(2902698): a, c, g or t
  modified_base (2903115)..(2903115): a, c, g or t
  modified_base (2906012)..(2906012): a, c, g or t
  modified_base (2906186)..(2906186): a, c, g or t
  modified_base (2908061)..(2908061): a, c, g or t
  modified_base (2908064)..(2908065): a, c, g or t
  modified_base (2908172)..(2908176): a, c, g or t
  modified_base (2908599)..(2908599): a, c, g or t
  modified_base (2909763)..(2909763): a, c, g or t
  modified_base (2911931)..(2911931): a, c, g or t
  modified_base (2912534)..(2912534): a, c, g or t
  modified_base (2913325)..(2913325): a, c, g or t
  modified_base (2916701)..(2916701): a, c, g or t
  modified_base (2917943)..(2917950): a, c, g or t
  modified_base (2920731)..(2920731): a, c, g or t
  modified_base (2922942)..(2922942): a, c, g or t
  modified_base (2923759)..(2923762): a, c, g or t
  modified_base (2924303)..(2924303): a, c, g or t
  modified_base (2927446)..(2927446): a, c, g or t
  modified_base (2927452)..(2927452): a, c, g or t
  modified_base (2929577)..(2929580): a, c, g or t
  modified_base (2931376)..(2931376): a, c, g or t
  modified_base (2931384)..(2931387): a, c, g or t
  modified_base (2931697)..(2931697): a, c, g or t
  modified_base (2934773)..(2934776): a, c, g or t
  modified_base (2934778)..(2934783): a, c, g or t
  modified_base (2936438)..(2936447): a, c, g or t
  modified_base (2936481)..(2936494): a, c, g or t
  modified_base (2938390)..(2938390): a, c, g or t
  modified_base (2940912)..(2940913): a, c, g or t
  modified_base (2941122)..(2941122): a, c, g or t
  modified_base (2941278)..(2941278): a, c, g or t
  modified_base (2941280)..(2941280): a, c, g or t
  modified_base (2943148)..(2943150): a, c, g or t
  modified_base (2943407)..(2943407): a, c, g or t
  modified_base (2943467)..(2943467): a, c, g or t
  modified_base (2947421)..(2947421): a, c, g or t
  modified_base (2949192)..(2949197): a, c, g or t
  modified_base (2950518)..(2950518): a, c, g or t
  modified_base (2951824)..(2951826): a, c, g or t
  modified_base (2951828)..(2951830): a, c, g or t
  modified_base (2952784)..(2952784): a, c, g or t
  modified_base (2954892)..(2954892): a, c, g or t
  modified_base (2955921)..(2955926): a, c, g or t
  modified_base (2956019)..(2956019): a, c, g or t
  modified_base (2956217)..(2956217): a, c, g or t
  modified_base (2957560)..(2957560): a, c, g or t
  modified_base (2957562)..(2957562): a, c, g or t
  modified_base (2958589)..(2958589): a, c, g or t
  modified_base (2961322)..(2961322): a, c, g or t
  modified_base (2961425)..(2961425): a, c, g or t
  modified_base (2962535)..(2962535): a, c, g or t
  modified_base (2963131)..(2963131): a, c, g or t
  modified_base (2965538)..(2965538): a, c, g or t
  modified_base (2965586)..(2965586): a, c, g or t
  modified_base (2965591)..(2965591): a, c, g or t
  modified_base (2966850)..(2966850): a, c, g or t
  modified_base (2966861)..(2966861): a, c, g or t
  modified_base (2967358)..(2967366): a, c, g or t
  modified_base (2967550)..(2967553): a, c, g or t
  modified_base (2969786)..(2969786): a, c, g or t
  modified_base (2970400)..(2970400): a, c, g or t
  modified_base (2971631)..(2971631): a, c, g or t
  modified_base (2971787)..(2971787): a, c, g or t
  modified_base (2973985)..(2973988): a, c, g or t
  modified_base (2974759)..(2974759): a, c, g or t
  modified_base (2976955)..(2976961): a, c, g or t
  modified_base (2977322)..(2977322): a, c, g or t
  modified_base (2977324)..(2977331): a, c, g or t
  modified_base (2978393)..(2978393): a, c, g or t
  modified_base (2978739)..(2978739): a, c, g or t
  modified_base (2979728)..(2979728): a, c, g or t
  modified_base (2981696)..(2981697): a, c, g or t
  modified_base (2982235)..(2982235): a, c, g or t
  modified_base (2983665)..(2983672): a, c, g or t
  modified_base (2984361)..(2984361): a, c, g or t
  modified_base (2985182)..(2985182): a, c, g or t
  modified_base (2985227)..(2985227): a, c, g or t
  modified_base (2985606)..(2985606): a, c, g or t
  modified_base (2986011)..(2986011): a, c, g or t
  modified_base (2987928)..(2987929): a, c, g or t
  modified_base (2988493)..(2988493): a, c, g or t
  modified_base (2989000)..(2989000): a, c, g or t
  modified_base (2993134)..(2993144): a, c, g or t
  modified_base (2993150)..(2993151): a, c, g or t
  modified_base (2995005)..(2995005): a, c, g or t
  modified_base (2995525)..(2995525): a, c, g or t
  modified_base (2995604)..(2995609): a, c, g or t
  modified_base (2995729)..(2995729): a, c, g or t
  modified_base (2995738)..(2995738): a, c, g or t
  modified_base (2997560)..(2997561): a, c, g or t
  modified_base (2997665)..(2997665): a, c, g or t
  modified_base (2997950)..(2997950): a, c, g or t
  modified_base (2997970)..(2997970): a, c, g or t
  modified_base (2998018)..(2998018): a, c, g or t
  modified_base (2999073)..(2999073): a, c, g or t
  modified_base (2999197)..(2999197): a, c, g or t
  modified_base (3002588)..(3002588): a, c, g or t
  modified_base (3004605)..(3004607): a, c, g or t
  modified_base (3004611)..(3004611): a, c, g or t
  modified_base (3005789)..(3005789): a, c, g or t
  modified_base (3005840)..(3005840): a, c, g or t
  modified_base (3006974)..(3006974): a, c, g or t
  modified_base (3006980)..(3006980): a, c, g or t
  modified_base (3006982)..(3006982): a, c, g or t
  modified_base (3008426)..(3008426): a, c, g or t
  modified_base (3010351)..(3010351): a, c, g or t
  modified_base (3012303)..(3012303): a, c, g or t
  modified_base (3012625)..(3012625): a, c, g or t
  modified_base (3013576)..(3013576): a, c, g or t
  modified_base (3013758)..(3013758): a, c, g or t
  modified_base (3013760)..(3013760): a, c, g or t
  modified_base (3013832)..(3013832): a, c, g or t
  modified_base (3014341)..(3014341): a, c, g or t
  modified_base (3015176)..(3015176): a, c, g or t
  modified_base (3019425)..(3019428): a, c, g or t
  modified_base (3021281)..(3021281): a, c, g or t
  modified_base (3021656)..(3021656): a, c, g or t
  modified_base (3024296)..(3024296): a, c, g or t
  modified_base (3026236)..(3026236): a, c, g or t
  modified_base (3026381)..(3026382): a, c, g or t
  modified_base (3026384)..(3026386): a, c, g or t
  modified_base (3026931)..(3026931): a, c, g or t
  modified_base (3026951)..(3026951): a, c, g or t
  modified_base (3027001)..(3027001): a, c, g or t
  modified_base (3028080)..(3028085): a, c, g or t
  modified_base (3028278)..(3028278): a, c, g or t
  modified_base (3032344)..(3032347): a, c, g or t
  modified_base (3034396)..(3034396): a, c, g or t
  modified_base (3035165)..(3035165): a, c, g or t
  modified_base (3035787)..(3035787): a, c, g or t
  modified_base (3038571)..(3038571): a, c, g or t
  modified_base (3046629)..(3046629): a, c, g or t
  modified_base (3046848)..(3046848): a, c, g or t
  modified_base (3046874)..(3046874): a, c, g or t
  modified_base (3046914)..(3046914): a, c, g or t
  modified_base (3049911)..(3049911): a, c, g or t
  modified_base (3049949)..(3049949): a, c, g or t
  modified_base (3054948)..(3054948): a, c, g or t
  modified_base (3059621)..(3059621): a, c, g or t
  modified_base (3062696)..(3062696): a, c, g or t
  modified_base (3068401)..(3068401): a, c, g or t
  modified_base (3069135)..(3069138): a, c, g or t
  modified_base (3069363)..(3069367): a, c, g or t
  modified_base (3069384)..(3069384): a, c, g or t
  modified_base (3070974)..(3070974): a, c, g or t
  modified_base (3071583)..(3071583): a, c, g or t
  modified_base (3077370)..(3077370): a, c, g or t
  modified_base (3078727)..(3078727): a, c, g or t
  modified_base (3080892)..(3080892): a, c, g or t
  modified_base (3081045)..(3081045): a, c, g or t
  modified_base (3081501)..(3081506): a, c, g or t
  modified_base (3083793)..(3083793): a, c, g or t
  modified_base (3083865)..(3083865): a, c, g or t
  modified_base (3084249)..(3084249): a, c, g or t
  modified_base (3085386)..(3085389): a, c, g or t
  modified_base (3085420)..(3085420): a, c, g or t
  modified_base (3085576)..(3085576): a, c, g or t
  modified_base (3085616)..(3085621): a, c, g or t
  modified_base (3091741)..(3091744): a, c, g or t
  modified_base (3091747)..(3091748): a, c, g or t
  modified_base (3091750)..(3091759): a, c, g or t
  modified_base (3092138)..(3092138): a, c, g or t
  modified_base (3092185)..(3092185): a, c, g or t
  modified_base (3092203)..(3092203): a, c, g or t
  modified_base (3092207)..(3092207): a, c, g or t
  modified_base (3095006)..(3095009): a, c, g or t
  modified_base (3095343)..(3095348): a, c, g or t
  modified_base (3095464)..(3095464): a, c, g or t
  modified_base (3095473)..(3095473): a, c, g or t
  modified_base (3096046)..(3096046): a, c, g or t
  modified_base (3096132)..(3096178): a, c, g or t
  modified_base (3096184)..(3096184): a, c, g or t
  modified_base (3096351)..(3096351): a, c, g or t
  modified_base (3096392)..(3096393): a, c, g or t
  modified_base (3096397)..(3096436): a, c, g or t
  modified_base (3096590)..(3096629): a, c, g or t
  modified_base (3096693)..(3096697): a, c, g or t
  modified_base (3096701)..(3096701): a, c, g or t
  modified_base (3096710)..(3096710): a, c, g or t
  modified_base (3096766)..(3096771): a, c, g or t
  modified_base (3096773)..(3096774): a, c, g or t
  modified_base (3096798)..(3096799): a, c, g or t
  modified_base (3096822)..(3096822): a, c, g or t
  modified_base (3096847)..(3096856): a, c, g or t
  modified_base (3096955)..(3096956): a, c, g or t
  modified_base (3096982)..(3096983): a, c, g or t
  modified_base (3097095)..(3097096): a, c, g or t
  modified_base (3097227)..(3097227): a, c, g or t
  modified_base (3097335)..(3097335): a, c, g or t
  modified_base (3097625)..(3097626): a, c, g or t
  modified_base (3097628)..(3097631): a, c, g or t
  modified_base (3097638)..(3097640): a, c, g or t
  modified_base (3097642)..(3097649): a, c, g or t
  modified_base (3097784)..(3097798): a, c, g or t
  modified_base (3097883)..(3097887): a, c, g or t
  modified_base (3097951)..(3097954): a, c, g or t
  modified_base (3098057)..(3098061): a, c, g or t
  modified_base (3098190)..(3098192): a, c, g or t
  modified_base (3098255)..(3098255): a, c, g or t
  modified_base (3098562)..(3098562): a, c, g or t
  modified_base (3098671)..(3098675): a, c, g or t
  modified_base (3099523)..(3099523): a, c, g or t
  modified_base (3103164)..(3103164): a, c, g or t
  modified_base (3103629)..(3103629): a, c, g or t
  modified_base (3104044)..(3104047): a, c, g or t
  modified_base (3105211)..(3105212): a, c, g or t
  modified_base (3105216)..(3105219): a, c, g or t
  modified_base (3105285)..(3105288): a, c, g or t
  modified_base (3105321)..(3105321): a, c, g or t
  modified_base (3105602)..(3105602): a, c, g or t
  modified_base (3105648)..(3105651): a, c, g or t
  modified_base (3105663)..(3105663): a, c, g or t
  modified_base (3105696)..(3105696): a, c, g or t
  modified_base (3105960)..(3105960): a, c, g or t
  modified_base (3106729)..(3106729): a, c, g or t
  modified_base (3110993)..(3110993): a, c, g or t
  modified_base (3112677)..(3112681): a, c, g or t
  modified_base (3116993)..(3116993): a, c, g or t
  modified_base (3120400)..(3120403): a, c, g or t
  modified_base (3120772)..(3120775): a, c, g or t
  modified_base (3122166)..(3122181): a, c, g or t
  modified_base (3122662)..(3122662): a, c, g or t
  modified_base (3123344)..(3123392): a, c, g or t
  modified_base (3123420)..(3123420): a, c, g or t
  modified_base (3123425)..(3123485): a, c, g or t
  modified_base (3123496)..(3123497): a, c, g or t
  modified_base (3123523)..(3123568): a, c, g or t
  modified_base (3123573)..(3123573): a, c, g or t
  modified_base (3123577)..(3123578): a, c, g or t
  modified_base (3123590)..(3123596): a, c, g or t
  modified_base (3123634)..(3123636): a, c, g or t
  modified_base (3123639)..(3123640): a, c, g or t
  modified_base (3123642)..(3123643): a, c, g or t
  modified_base (3123667)..(3123680): a, c, g or t
  modified_base (3123704)..(3123756): a, c, g or t
  modified_base (3123767)..(3123768): a, c, g or t
  modified_base (3123780)..(3123802): a, c, g or t
  modified_base (3123813)..(3123814): a, c, g or t
  modified_base (3123818)..(3123820): a, c, g or t
  modified_base (3123826)..(3123858): a, c, g or t
  modified_base (3123864)..(3123865): a, c, g or t
  modified_base (3123905)..(3123921): a, c, g or t
  modified_base (3123963)..(3123964): a, c, g or t
  modified_base (3123968)..(3124044): a, c, g or t
  modified_base (3124057)..(3124058): a, c, g or t
  modified_base (3124133)..(3124134): a, c, g or t
  modified_base (3124139)..(3124939): a, c, g or t
  modified_base (3124942)..(3124945): a, c, g or t
  modified_base (3124947)..(3124948): a, c, g or t
  modified_base (3124960)..(3125183): a, c, g or t
  modified_base (3125205)..(3125206): a, c, g or t
  modified_base (3125211)..(3125469): a, c, g or t
  modified_base (3125479)..(3125480): a, c, g or t
  modified_base (3125490)..(3125529): a, c, g or t
  modified_base (3125551)..(3125556): a, c, g or t
  modified_base (3125590)..(3125814): a, c, g or t
  modified_base (3125914)..(3125955): a, c, g or t
  modified_base (3126085)..(3126085): a, c, g or t
  modified_base (3126115)..(3126154): a, c, g or t
  modified_base (3126196)..(3126202): a, c, g or t
  modified_base (3126229)..(3126232): a, c, g or t
  modified_base (3126237)..(3126295): a, c, g or t
  modified_base (3126302)..(3126302): a, c, g or t
  modified_base (3126305)..(3126305): a, c, g or t
  modified_base (3126332)..(3126332): a, c, g or t
  modified_base (3126334)..(3126339): a, c, g or t
  modified_base (3126341)..(3126341): a, c, g or t
  modified_base (3126346)..(3126346): a, c, g or t
  modified_base (3126362)..(3126421): a, c, g or t
  modified_base (3126425)..(3126425): a, c, g or t
  modified_base (3126439)..(3126440): a, c, g or t
  modified_base (3126444)..(3127232): a, c, g or t
  modified_base (3127235)..(3127235): a, c, g or t
  modified_base (3127238)..(3127238): a, c, g or t
  modified_base (3127267)..(3127488): a, c, g or t
  modified_base (3127490)..(3127491): a, c, g or t
  modified_base (3127515)..(3127515): a, c, g or t
  modified_base (3127517)..(3127639): a, c, g or t
  modified_base (3127647)..(3127647): a, c, g or t
  modified_base (3127659)..(3127662): a, c, g or t
  modified_base (3127684)..(3127700): a, c, g or t
  modified_base (3127731)..(3127731): a, c, g or t
  modified_base (3127744)..(3127745): a, c, g or t
  modified_base (3127747)..(3127761): a, c, g or t
  modified_base (3127861)..(3127886): a, c, g or t
  modified_base (3127902)..(3127903): a, c, g or t
  modified_base (3127908)..(3127933): a, c, g or t
  modified_base (3127990)..(3128022): a, c, g or t
  modified_base (3128025)..(3128026): a, c, g or t
  modified_base (3128029)..(3128030): a, c, g or t
  modified_base (3128121)..(3128128): a, c, g or t
  modified_base (3128232)..(3128233): a, c, g or t
  modified_base (3128235)..(3128236): a, c, g or t
  modified_base (3128238)..(3128239): a, c, g or t
  modified_base (3128275)..(3128276): a, c, g or t
  modified_base (3128306)..(3128307): a, c, g or t
  modified_base (3128311)..(3128312): a, c, g or t
  modified_base (3128385)..(3128400): a, c, g or t
  modified_base (3128428)..(3128429): a, c, g or t
  modified_base (3128440)..(3128441): a, c, g or t
  modified_base (3128467)..(3128476): a, c, g or t
  modified_base (3128527)..(3128530): a, c, g or t
  modified_base (3128532)..(3128533): a, c, g or t
  modified_base (3128535)..(3128536): a, c, g or t
  modified_base (3128682)..(3128719): a, c, g or t
  modified_base (3128740)..(3128741): a, c, g or t
  modified_base (3128757)..(3128758): a, c, g or t
  modified_base (3128767)..(3128768): a, c, g or t
  modified_base (3128772)..(3128773): a, c, g or t
  modified_base (3128800)..(3128801): a, c, g or t
  modified_base (3128841)..(3128859): a, c, g or t
  modified_base (3128935)..(3128940): a, c, g or t
  modified_base (3128970)..(3128986): a, c, g or t
  modified_base (3129040)..(3129054): a, c, g or t
  modified_base (3129120)..(3129176): a, c, g or t
  modified_base (3129205)..(3129206): a, c, g or t
  modified_base (3129234)..(3129242): a, c, g or t
  modified_base (3129255)..(3129256): a, c, g or t
  modified_base (3129262)..(3129263): a, c, g or t
  modified_base (3129265)..(3129294): a, c, g or t
  modified_base (3129323)..(3129328): a, c, g or t
  modified_base (3129353)..(3129434): a, c, g or t
  modified_base (3129457)..(3129615): a, c, g or t
  modified_base (3129639)..(3129641): a, c, g or t
  modified_base (3129702)..(3129720): a, c, g or t
  modified_base (3129748)..(3129748): a, c, g or t
  modified_base (3129763)..(3129766): a, c, g or t
  modified_base (3129773)..(3129774): a, c, g or t
  modified_base (3129776)..(3129776): a, c, g or t
  modified_base (3129787)..(3129787): a, c, g or t
  modified_base (3129790)..(3129803): a, c, g or t
  modified_base (3129885)..(3129888): a, c, g or t
  modified_base (3129895)..(3129895): a, c, g or t
  modified_base (3129924)..(3129924): a, c, g or t
  modified_base (3129943)..(3129944): a, c, g or t
  modified_base (3129968)..(3129971): a, c, g or t
  modified_base (3129974)..(3129978): a, c, g or t
  modified_base (3129980)..(3129980): a, c, g or t
  modified_base (3130014)..(3130015): a, c, g or t
  modified_base (3130017)..(3130068): a, c, g or t
  modified_base (3130092)..(3130135): a, c, g or t
  modified_base (3130138)..(3130139): a, c, g or t
  modified_base (3130185)..(3130185): a, c, g or t
  modified_base (3130190)..(3130239): a, c, g or t
  modified_base (3130427)..(3130438): a, c, g or t
  modified_base (3130482)..(3130482): a, c, g or t
  modified_base (3130588)..(3130589): a, c, g or t
  modified_base (3130673)..(3130681): a, c, g or t
  modified_base (3130694)..(3130695): a, c, g or t
  modified_base (3130781)..(3130783): a, c, g or t
  modified_base (3130786)..(3130848): a, c, g or t
  modified_base (3131004)..(3131005): a, c, g or t
  modified_base (3131044)..(3131044): a, c, g or t
  modified_base (3131046)..(3131050): a, c, g or t
  modified_base (3131400)..(3131403): a, c, g or t
  modified_base (3131522)..(3131525): a, c, g or t
  modified_base (3131582)..(3131583): a, c, g or t
  modified_base (3131586)..(3131596): a, c, g or t
  modified_base (3131690)..(3131690): a, c, g or t
  modified_base (3131878)..(3131878): a, c, g or t
  modified_base (3131955)..(3131958): a, c, g or t
  modified_base (3131994)..(3132004): a, c, g or t
  modified_base (3132132)..(3132136): a, c, g or t
  modified_base (3132176)..(3132181): a, c, g or t
  modified_base (3132220)..(3132226): a, c, g or t
  modified_base (3132731)..(3132738): a, c, g or t
  modified_base (3133275)..(3133282): a, c, g or t
  modified_base (3133420)..(3133420): a, c, g or t
  modified_base (3133605)..(3133605): a, c, g or t
  modified_base (3133644)..(3133644): a, c, g or t
  modified_base (3133693)..(3133693): a, c, g or t
  modified_base (3133708)..(3133708): a, c, g or t
  modified_base (3134804)..(3134804): a, c, g or t
  modified_base (3136276)..(3136276): a, c, g or t
  modified_base (3136311)..(3136314): a, c, g or t
  modified_base (3137462)..(3137470): a, c, g or t
  modified_base (3140021)..(3140021): a, c, g or t
  modified_base (3140612)..(3140612): a, c, g or t
  modified_base (3140911)..(3140911): a, c, g or t
  modified_base (3140955)..(3140955): a, c, g or t
  modified_base (3141343)..(3141343): a, c, g or t
  modified_base (3141490)..(3141490): a, c, g or t
  modified_base (3142177)..(3142177): a, c, g or t
  modified_base (3142792)..(3142792): a, c, g or t
  modified_base (3143778)..(3143778): a, c, g or t
  modified_base (3144401)..(3144401): a, c, g or t
  modified_base (3146668)..(3146668): a, c, g or t
  modified_base (3146672)..(3146672): a, c, g or t
  modified_base (3147186)..(3147186): a, c, g or t
  modified_base (3147272)..(3147275): a, c, g or t
  modified_base (3148011)..(3148011): a, c, g or t
  modified_base (3148042)..(3148045): a, c, g or t
  modified_base (3149617)..(3149620): a, c, g or t
  modified_base (3149857)..(3149857): a, c, g or t
  modified_base (3150499)..(3150499): a, c, g or t
  modified_base (3150501)..(3150501): a, c, g or t
  modified_base (3150585)..(3150585): a, c, g or t
  modified_base (3150745)..(3150748): a, c, g or t
  modified_base (3151148)..(3151148): a, c, g or t
  modified_base (3151721)..(3151721): a, c, g or t
  modified_base (3151759)..(3151759): a, c, g or t
  modified_base (3151963)..(3151963): a, c, g or t
  modified_base (3153635)..(3153635): a, c, g or t
  modified_base (3153854)..(3153854): a, c, g or t
  modified_base (3153880)..(3153880): a, c, g or t
  modified_base (3154571)..(3154571): a, c, g or t
  modified_base (3155491)..(3155499): a, c, g or t
  modified_base (3156120)..(3156120): a, c, g or t
  modified_base (3156395)..(3156395): a, c, g or t
  modified_base (3157372)..(3157372): a, c, g or t
  modified_base (3157806)..(3157806): a, c, g or t
  modified_base (3157823)..(3157823): a, c, g or t
  modified_base (3157946)..(3157955): a, c, g or t
  modified_base (3158186)..(3158204): a, c, g or t
  modified_base (3160734)..(3160734): a, c, g or t
  modified_base (3161171)..(3161171): a, c, g or t
  modified_base (3161713)..(3161713): a, c, g or t
  modified_base (3161741)..(3161741): a, c, g or t
  modified_base (3162556)..(3162556): a, c, g or t
  modified_base (3162684)..(3162684): a, c, g or t
  modified_base (3164122)..(3164123): a, c, g or t
  modified_base (3169058)..(3169058): a, c, g or t
  modified_base (3170266)..(3170266): a, c, g or t
  modified_base (3170355)..(3170355): a, c, g or t
  modified_base (3170444)..(3170444): a, c, g or t
  modified_base (3170459)..(3170459): a, c, g or t
  modified_base (3170523)..(3170523): a, c, g or t
  modified_base (3172076)..(3172076): a, c, g or t
  modified_base (3173435)..(3173435): a, c, g or t
  modified_base (3173713)..(3173713): a, c, g or t
  modified_base (3173938)..(3173938): a, c, g or t
  modified_base (3176152)..(3176155): a, c, g or t
  modified_base (3176162)..(3176166): a, c, g or t
  modified_base (3176360)..(3176360): a, c, g or t
  modified_base (3176714)..(3176714): a, c, g or t
  modified_base (3177263)..(3177266): a, c, g or t
  modified_base (3177837)..(3177838): a, c, g or t
  modified_base (3177933)..(3177933): a, c, g or t
  modified_base (3178230)..(3178230): a, c, g or t
  modified_base (3181055)..(3181058): a, c, g or t
  modified_base (3181060)..(3181061): a, c, g or t
  modified_base (3181063)..(3181084): a, c, g or t
  modified_base (3181087)..(3181088): a, c, g or t
  modified_base (3181191)..(3181192): a, c, g or t
  modified_base (3181196)..(3181197): a, c, g or t
  modified_base (3181199)..(3181244): a, c, g or t
  modified_base (3181331)..(3181350): a, c, g or t
  modified_base (3181353)..(3181354): a, c, g or t
  modified_base (3185012)..(3185015): a, c, g or t
  modified_base (3185918)..(3185918): a, c, g or t
  modified_base (3186148)..(3186148): a, c, g or t
  modified_base (3186542)..(3186542): a, c, g or t
  modified_base (3187237)..(3187237): a, c, g or t
  modified_base (3188064)..(3188070): a, c, g or t
  modified_base (3188072)..(3188073): a, c, g or t
  modified_base (3188577)..(3188578): a, c, g or t
  modified_base (3188580)..(3188583): a, c, g or t
  modified_base (3188587)..(3188588): a, c, g or t
  modified_base (3188590)..(3188591): a, c, g or t
  modified_base (3190094)..(3190094): a, c, g or t
  modified_base (3190102)..(3190102): a, c, g or t
  modified_base (3190149)..(3190152): a, c, g or t
  modified_base (3192012)..(3192015): a, c, g or t
  modified_base (3192537)..(3192537): a, c, g or t
  modified_base (3192677)..(3192677): a, c, g or t
  modified_base (3193331)..(3193331): a, c, g or t
  modified_base (3197303)..(3197304): a, c, g or t
  modified_base (3198346)..(3198346): a, c, g or t
  modified_base (3198419)..(3198419): a, c, g or t
  modified_base (3199474)..(3199474): a, c, g or t
  modified_base (3200339)..(3200339): a, c, g or t
  modified_base (3200832)..(3200836): a, c, g or t
  modified_base (3201191)..(3201195): a, c, g or t
  modified_base (3201197)..(3201198): a, c, g or t
  modified_base (3201535)..(3201538): a, c, g or t
  modified_base (3202178)..(3202178): a, c, g or t
  modified_base (3205767)..(3205767): a, c, g or t
  modified_base (3205921)..(3205921): a, c, g or t
  modified_base (3207240)..(3207240): a, c, g or t
  modified_base (3207653)..(3207656): a, c, g or t
  modified_base (3208929)..(3208929): a, c, g or t
  modified_base (3209063)..(3209063): a, c, g or t
  modified_base (3209277)..(3209277): a, c, g or t
  modified_base (3210109)..(3210109): a, c, g or t
  modified_base (3210821)..(3210821): a, c, g or t
  modified_base (3211333)..(3211333): a, c, g or t
  modified_base (3213107)..(3213110): a, c, g or t
  modified_base (3213417)..(3213420): a, c, g or t
  modified_base (3213904)..(3213913): a, c, g or t
  modified_base (3214199)..(3214199): a, c, g or t
  modified_base (3214942)..(3214942): a, c, g or t
  modified_base (3216568)..(3216568): a, c, g or t
  modified_base (3217289)..(3217289): a, c, g or t
  modified_base (3218604)..(3218607): a, c, g or t
  modified_base (3218690)..(3218690): a, c, g or t
  modified_base (3220396)..(3220398): a, c, g or t
  modified_base (3220400)..(3220400): a, c, g or t
  modified_base (3221001)..(3221001): a, c, g or t
  modified_base (3221571)..(3221571): a, c, g or t
  modified_base (3221641)..(3221641): a, c, g or t
  modified_base (3222061)..(3222064): a, c, g or t
  modified_base (3225297)..(3225297): a, c, g or t
  modified_base (3226050)..(3226050): a, c, g or t
  modified_base (3226608)..(3226608): a, c, g or t
  modified_base (3226638)..(3226638): a, c, g or t
  modified_base (3227308)..(3227308): a, c, g or t
  modified_base (3233468)..(3233471): a, c, g or t
  modified_base (3235375)..(3235375): a, c, g or t
  modified_base (3236104)..(3236104): a, c, g or t
  modified_base (3240723)..(3240723): a, c, g or t
  modified_base (3240735)..(3240735): a, c, g or t
  modified_base (3240858)..(3240858): a, c, g or t
  modified_base (3241741)..(3241741): a, c, g or t
  modified_base (3242696)..(3242696): a, c, g or t
  modified_base (3246133)..(3246134): a, c, g or t
  modified_base (3246136)..(3246141): a, c, g or t
  modified_base (3248166)..(3248168): a, c, g or t
  modified_base (3249290)..(3249290): a, c, g or t
  modified_base (3249529)..(3249531): a, c, g or t
  modified_base (3250789)..(3250792): a, c, g or t
  modified_base (3252665)..(3252665): a, c, g or t
  modified_base (3253249)..(3253249): a, c, g or t
  modified_base (3260448)..(3260448): a, c, g or t
  modified_base (3260741)..(3260741): a, c, g or t
  modified_base (3262189)..(3262189): a, c, g or t
  modified_base (3262832)..(3262833): a, c, g or t
  modified_base (3263272)..(3263272): a, c, g or t
  modified_base (3263936)..(3263936): a, c, g or t
  modified_base (3264571)..(3264571): a, c, g or t
  modified_base (3267053)..(3267055): a, c, g or t
  modified_base (3267958)..(3267958): a, c, g or t
  modified_base (3268838)..(3268838): a, c, g or t
  modified_base (3268840)..(3268840): a, c, g or t
  modified_base (3271173)..(3271185): a, c, g or t
  modified_base (3271642)..(3271643): a, c, g or t
  modified_base (3271730)..(3271730): a, c, g or t
  modified_base (3277243)..(3277249): a, c, g or t
  modified_base (3277402)..(3277405): a, c, g or t
  modified_base (3278300)..(3278300): a, c, g or t
  modified_base (3279934)..(3279934): a, c, g or t
  modified_base (3281771)..(3281771): a, c, g or t
  modified_base (3284170)..(3284170): a, c, g or t
  modified_base (3285950)..(3285953): a, c, g or t
  modified_base (3287213)..(3287213): a, c, g or t
  modified_base (3289368)..(3289368): a, c, g or t
  modified_base (3290692)..(3290695): a, c, g or t
  modified_base (3293143)..(3293143): a, c, g or t
  modified_base (3293215)..(3293215): a, c, g or t
  modified_base (3293432)..(3293436): a, c, g or t
  modified_base (3293771)..(3293771): a, c, g or t
  modified_base (3295887)..(3295887): a, c, g or t
  modified_base (3296035)..(3296035): a, c, g or t
  modified_base (3298418)..(3298418): a, c, g or t
  modified_base (3300929)..(3300935): a, c, g or t
  modified_base (3302035)..(3302035): a, c, g or t
  modified_base (3302503)..(3302503): a, c, g or t
  modified_base (3304282)..(3304282): a, c, g or t
  modified_base (3304427)..(3304434): a, c, g or t
  modified_base (3305394)..(3305394): a, c, g or t
  modified_base (3305515)..(3305515): a, c, g or t
  modified_base (3308746)..(3308763): a, c, g or t
  modified_base (3308827)..(3308884): a, c, g or t
  modified_base (3308904)..(3308905): a, c, g or t
  modified_base (3308956)..(3308957): a, c, g or t
  modified_base (3309745)..(3309745): a, c, g or t
  modified_base (3310031)..(3310031): a, c, g or t
  modified_base (3310143)..(3310143): a, c, g or t
  modified_base (3310294)..(3310294): a, c, g or t
  modified_base (3310973)..(3310974): a, c, g or t
  modified_base (3310976)..(3310978): a, c, g or t
  modified_base (3311977)..(3311977): a, c, g or t
  modified_base (3312004)..(3312004): a, c, g or t
  modified_base (3314489)..(3314492): a, c, g or t
  modified_base (3317264)..(3317264): a, c, g or t
  modified_base (3319849)..(3319849): a, c, g or t
  modified_base (3322927)..(3322930): a, c, g or t
  modified_base (3323915)..(3323918): a, c, g or t
  modified_base (3325685)..(3325685): a, c, g or t
  modified_base (3330324)..(3330324): a, c, g or t
  modified_base (3331812)..(3331812): a, c, g or t
  modified_base (3332073)..(3332073): a, c, g or t
  modified_base (3332849)..(3332849): a, c, g or t
  modified_base (3333716)..(3333720): a, c, g or t
  modified_base (3334535)..(3334535): a, c, g or t
  modified_base (3335688)..(3335688): a, c, g or t
  modified_base (3336243)..(3336243): a, c, g or t
  modified_base (3339519)..(3339519): a, c, g or t
  modified_base (3340831)..(3340831): a, c, g or t
  modified_base (3341456)..(3341456): a, c, g or t
  modified_base (3344291)..(3344291): a, c, g or t
  modified_base (3344343)..(3344343): a, c, g or t
  modified_base (3345566)..(3345569): a, c, g or t
  modified_base (3345571)..(3345572): a, c, g or t
  modified_base (3345586)..(3345586): a, c, g or t
  modified_base (3347347)..(3347351): a, c, g or t
  modified_base (3348174)..(3348174): a, c, g or t
  modified_base (3348441)..(3348441): a, c, g or t
  modified_base (3349675)..(3349675): a, c, g or t
  modified_base (3349677)..(3349694): a, c, g or t
  modified_base (3349743)..(3349757): a, c, g or t
  modified_base (3350654)..(3350654): a, c, g or t
  modified_base (3352553)..(3352556): a, c, g or t
  modified_base (3352746)..(3352750): a, c, g or t
  modified_base (3352752)..(3352754): a, c, g or t
  modified_base (3352757)..(3352759): a, c, g or t
  modified_base (3353368)..(3353369): a, c, g or t
  modified_base (3353449)..(3353452): a, c, g or t
  modified_base (3353933)..(3353936): a, c, g or t
  modified_base (3356184)..(3356188): a, c, g or t
  modified_base (3356278)..(3356286): a, c, g or t
  modified_base (3356442)..(3356442): a, c, g or t
  modified_base (3356623)..(3356623): a, c, g or t
  modified_base (3357613)..(3357614): a, c, g or t
  modified_base (3357637)..(3357637): a, c, g or t
  modified_base (3358351)..(3358351): a, c, g or t
  modified_base (3358709)..(3358709): a, c, g or t
  modified_base (3358858)..(3358864): a, c, g or t
  modified_base (3361383)..(3361383): a, c, g or t
  modified_base (3362463)..(3362467): a, c, g or t
  modified_base (3364830)..(3364833): a, c, g or t
  modified_base (3365122)..(3365124): a, c, g or t
  modified_base (3365304)..(3365304): a, c, g or t
  modified_base (3366041)..(3366041): a, c, g or t
  modified_base (3366659)..(3366663): a, c, g or t
  modified_base (3366762)..(3366762): a, c, g or t
  modified_base (3368383)..(3368383): a, c, g or t
  modified_base (3368539)..(3368540): a, c, g or t
  modified_base (3369779)..(3369779): a, c, g or t
  modified_base (3371456)..(3371456): a, c, g or t
  modified_base (3373456)..(3373459): a, c, g or t
  modified_base (3377070)..(3377070): a, c, g or t
  modified_base (3378740)..(3378740): a, c, g or t
  modified_base (3378898)..(3378898): a, c, g or t
  modified_base (3379032)..(3379037): a, c, g or t
  modified_base (3380382)..(3380382): a, c, g or t
  modified_base (3381488)..(3381491): a, c, g or t
  modified_base (3381494)..(3381494): a, c, g or t
  modified_base (3383303)..(3383303): a, c, g or t
  modified_base (3384353)..(3384353): a, c, g or t
  modified_base (3385119)..(3385119): a, c, g or t
  modified_base (3386021)..(3386021): a, c, g or t
  modified_base (3388336)..(3388336): a, c, g or t
  modified_base (3389764)..(3389764): a, c, g or t
  modified_base (3394036)..(3394036): a, c, g or t
  modified_base (3395278)..(3395278): a, c, g or t
  modified_base (3398643)..(3398643): a, c, g or t
  modified_base (3399363)..(3399363): a, c, g or t
  modified_base (3399366)..(3399366): a, c, g or t
  modified_base (3400770)..(3400770): a, c, g or t
  modified_base (3401157)..(3401157): a, c, g or t
  modified_base (3406596)..(3406596): a, c, g or t
  modified_base (3406625)..(3406625): a, c, g or t
  modified_base (3407291)..(3407291): a, c, g or t
  modified_base (3408673)..(3408673): a, c, g or t
  modified_base (3409618)..(3409618): a, c, g or t
  modified_base (3410581)..(3410581): a, c, g or t
  modified_base (3410782)..(3410782): a, c, g or t
  modified_base (3410864)..(3410864): a, c, g or t
  modified_base (3412044)..(3412047): a, c, g or t
  modified_base (3413611)..(3413611): a, c, g or t
  modified_base (3414350)..(3414350): a, c, g or t
  modified_base (3418396)..(3418396): a, c, g or t
  modified_base (3418401)..(3418408): a, c, g or t
  modified_base (3418924)..(3418924): a, c, g or t
  modified_base (3419335)..(3419335): a, c, g or t
  modified_base (3419355)..(3419357): a, c, g or t
  modified_base (3419475)..(3419475): a, c, g or t
  modified_base (3420870)..(3420873): a, c, g or t
  modified_base (3421733)..(3421734): a, c, g or t
  modified_base (3421756)..(3421756): a, c, g or t
  modified_base (3422711)..(3422711): a, c, g or t
  modified_base (3430719)..(3430719): a, c, g or t
  modified_base (3432516)..(3432516): a, c, g or t
  modified_base (3433866)..(3433866): a, c, g or t
  modified_base (3433869)..(3433872): a, c, g or t
  modified_base (3437895)..(3437895): a, c, g or t
  modified_base (3439090)..(3439094): a, c, g or t
  modified_base (3439511)..(3439511): a, c, g or t
  modified_base (3439875)..(3439881): a, c, g or t
  modified_base (3441663)..(3441663): a, c, g or t
  modified_base (3442958)..(3442958): a, c, g or t
  modified_base (3442985)..(3442985): a, c, g or t
  modified_base (3443059)..(3443059): a, c, g or t
  modified_base (3443080)..(3443080): a, c, g or t
  modified_base (3444832)..(3444835): a, c, g or t
  modified_base (3445274)..(3445274): a, c, g or t
  modified_base (3446411)..(3446415): a, c, g or t
  modified_base (3448269)..(3448269): a, c, g or t
  modified_base (3451070)..(3451078): a, c, g or t
  modified_base (3451414)..(3451417): a, c, g or t
  modified_base (3456066)..(3456066): a, c, g or t
  modified_base (3457025)..(3457025): a, c, g or t
  modified_base (3457446)..(3457446): a, c, g or t
  modified_base (3460342)..(3460346): a, c, g or t
  modified_base (3460409)..(3460412): a, c, g or t
  modified_base (3460414)..(3460418): a, c, g or t
  modified_base (3460724)..(3460724): a, c, g or t
  modified_base (3463660)..(3463660): a, c, g or t
  modified_base (3466129)..(3466129): a, c, g or t
  modified_base (3467531)..(3467531): a, c, g or t
  modified_base (3468766)..(3468766): a, c, g or t
  modified_base (3471704)..(3471704): a, c, g or t
  modified_base (3471909)..(3471909): a, c, g or t
  modified_base (3472140)..(3472140): a, c, g or t
  modified_base (3472695)..(3472698): a, c, g or t
  modified_base (3473636)..(3473636): a, c, g or t
  modified_base (3475723)..(3475725): a, c, g or t
  modified_base (3478478)..(3478478): a, c, g or t
  modified_base (3480109)..(3480109): a, c, g or t
  modified_base (3481776)..(3481777): a, c, g or t
  modified_base (3483200)..(3483203): a, c, g or t
  modified_base (3483968)..(3483968): a, c, g or t
  modified_base (3485537)..(3485537): a, c, g or t
  modified_base (3486097)..(3486097): a, c, g or t
  modified_base (3486757)..(3486757): a, c, g or t
  modified_base (3487978)..(3487983): a, c, g or t
  modified_base (3488066)..(3488066): a, c, g or t
  modified_base (3488137)..(3488137): a, c, g or t
  modified_base (3489298)..(3489301): a, c, g or t
  modified_base (3489927)..(3489930): a, c, g or t
  modified_base (3491949)..(3491959): a, c, g or t
  modified_base (3491961)..(3491962): a, c, g or t
  modified_base (3492486)..(3492486): a, c, g or t
  modified_base (3492491)..(3492498): a, c, g or t
  modified_base (3493127)..(3493132): a, c, g or t
  modified_base (3493684)..(3493687): a, c, g or t
  modified_base (3493805)..(3493808): a, c, g or t
  modified_base (3494663)..(3494663): a, c, g or t
  modified_base (3495192)..(3495195): a, c, g or t
  modified_base (3495197)..(3495200): a, c, g or t
  modified_base (3495338)..(3495341): a, c, g or t
  modified_base (3495346)..(3495347): a, c, g or t
  modified_base (3495354)..(3495355): a, c, g or t
  modified_base (3495359)..(3495360): a, c, g or t
  modified_base (3500662)..(3500671): a, c, g or t
  modified_base (3502696)..(3502696): a, c, g or t
  modified_base (3504057)..(3504060): a, c, g or t
  modified_base (3504301)..(3504301): a, c, g or t
  modified_base (3504561)..(3504564): a, c, g or t
  modified_base (3504936)..(3504997): a, c, g or t
  modified_base (3505569)..(3505569): a, c, g or t
  modified_base (3506219)..(3506219): a, c, g or t
  modified_base (3506312)..(3506312): a, c, g or t
  modified_base (3509495)..(3509495): a, c, g or t
  modified_base (3510792)..(3510792): a, c, g or t
  modified_base (3511409)..(3511409): a, c, g or t
  modified_base (3512408)..(3512408): a, c, g or t
  modified_base (3512519)..(3512519): a, c, g or t
  modified_base (3514691)..(3514691): a, c, g or t
  modified_base (3515137)..(3515137): a, c, g or t
  modified_base (3515947)..(3515947): a, c, g or t
  modified_base (3516990)..(3516990): a, c, g or t
  modified_base (3518047)..(3518047): a, c, g or t
  modified_base (3518837)..(3518837): a, c, g or t
  modified_base (3520613)..(3520613): a, c, g or t
  modified_base (3521128)..(3521128): a, c, g or t
  modified_base (3521796)..(3521796): a, c, g or t
  modified_base (3522001)..(3522004): a, c, g or t
  modified_base (3522046)..(3522046): a, c, g or t
  modified_base (3522065)..(3522065): a, c, g or t
  modified_base (3522144)..(3522144): a, c, g or t
  modified_base (3525461)..(3525461): a, c, g or t
  modified_base (3527270)..(3527270): a, c, g or t
  modified_base (3528388)..(3528388): a, c, g or t
  modified_base (3529613)..(3529613): a, c, g or t
  modified_base (3529828)..(3529828): a, c, g or t
  modified_base (3533793)..(3533793): a, c, g or t
  modified_base (3535009)..(3535009): a, c, g or t
  modified_base (3535649)..(3535655): a, c, g or t
  modified_base (3538546)..(3538546): a, c, g or t
  modified_base (3539027)..(3539027): a, c, g or t
  modified_base (3542343)..(3542344): a, c, g or t
  modified_base (3542542)..(3542542): a, c, g or t
  modified_base (3544323)..(3544323): a, c, g or t
  modified_base (3544389)..(3544389): a, c, g or t
  modified_base (3546038)..(3546038): a, c, g or t
  modified_base (3548739)..(3548739): a, c, g or t
  modified_base (3550616)..(3550616): a, c, g or t
  modified_base (3551139)..(3551139): a, c, g or t
  modified_base (3551557)..(3551560): a, c, g or t
  modified_base (3556893)..(3556896): a, c, g or t
  modified_base (3560671)..(3560671): a, c, g or t
  modified_base (3563615)..(3563617): a, c, g or t
  modified_base (3564140)..(3564141): a, c, g or t
  modified_base (3564161)..(3564161): a, c, g or t
  modified_base (3565549)..(3565550): a, c, g or t
  modified_base (3565818)..(3565818): a, c, g or t
  modified_base (3568912)..(3568912): a, c, g or t
  modified_base (3569623)..(3569627): a, c, g or t
  modified_base (3570377)..(3570377): a, c, g or t
  modified_base (3571526)..(3571532): a, c, g or t
  modified_base (3572917)..(3572917): a, c, g or t
  modified_base (3573254)..(3573254): a, c, g or t
  modified_base (3573533)..(3573533): a, c, g or t
  modified_base (3574367)..(3574372): a, c, g or t
  modified_base (3574863)..(3574868): a, c, g or t
  modified_base (3578719)..(3578722): a, c, g or t
  modified_base (3581616)..(3581616): a, c, g or t
  modified_base (3581759)..(3581759): a, c, g or t
  modified_base (3584783)..(3584783): a, c, g or t
  modified_base (3585658)..(3585658): a, c, g or t
  modified_base (3585677)..(3585677): a, c, g or t
  modified_base (3585747)..(3585748): a, c, g or t
  modified_base (3585794)..(3585795): a, c, g or t
  modified_base (3589035)..(3589036): a, c, g or t
  modified_base (3589639)..(3589639): a, c, g or t
  modified_base (3591439)..(3591439): a, c, g or t
  modified_base (3591461)..(3591464): a, c, g or t
  modified_base (3591590)..(3591595): a, c, g or t
  modified_base (3591862)..(3591862): a, c, g or t
  modified_base (3593483)..(3593486): a, c, g or t
  modified_base (3594373)..(3594373): a, c, g or t
  modified_base (3594920)..(3594920): a, c, g or t
  modified_base (3596711)..(3596711): a, c, g or t
  modified_base (3596738)..(3596738): a, c, g or t
  modified_base (3600299)..(3600299): a, c, g or t
  modified_base (3600326)..(3600326): a, c, g or t
  modified_base (3600363)..(3600363): a, c, g or t
  modified_base (3600389)..(3600389): a, c, g or t
  modified_base (3600399)..(3600399): a, c, g or t
  modified_base (3600452)..(3600452): a, c, g or t
  modified_base (3600473)..(3600473): a, c, g or t
  modified_base (3600482)..(3600482): a, c, g or t
  modified_base (3601002)..(3601008): a, c, g or t
  modified_base (3601421)..(3601423): a, c, g or t
  modified_base (3601811)..(3601811): a, c, g or t
  modified_base (3602602)..(3602603): a, c, g or t
  modified_base (3602608)..(3602608): a, c, g or t
  modified_base (3602980)..(3602980): a, c, g or t
  modified_base (3604262)..(3604267): a, c, g or t
  modified_base (3604529)..(3604529): a, c, g or t
  modified_base (3604754)..(3604754): a, c, g or t
  modified_base (3606961)..(3606961): a, c, g or t
  modified_base (3612588)..(3612588): a, c, g or t
  modified_base (3613356)..(3613356): a, c, g or t
  modified_base (3613726)..(3613726): a, c, g or t
  modified_base (3613729)..(3613729): a, c, g or t
  modified_base (3613894)..(3613894): a, c, g or t
  modified_base (3614719)..(3614719): a, c, g or t
  modified_base (3615525)..(3615525): a, c, g or t
  modified_base (3615601)..(3615603): a, c, g or t
  modified_base (3619095)..(3619095): a, c, g or t
  modified_base (3619542)..(3619542): a, c, g or t
  modified_base (3620424)..(3620424): a, c, g or t
  modified_base (3621826)..(3621829): a, c, g or t
  modified_base (3622342)..(3622350): a, c, g or t
  modified_base (3622808)..(3622808): a, c, g or t
  modified_base (3622855)..(3622855): a, c, g or t
  modified_base (3623162)..(3623162): a, c, g or t
  modified_base (3623529)..(3623529): a, c, g or t
  modified_base (3623740)..(3623740): a, c, g or t
  modified_base (3624899)..(3624911): a, c, g or t
  modified_base (3627746)..(3627746): a, c, g or t
  modified_base (3629564)..(3629567): a, c, g or t
  modified_base (3631435)..(3631435): a, c, g or t
  modified_base (3635151)..(3635151): a, c, g or t
  modified_base (3636289)..(3636289): a, c, g or t
  modified_base (3636291)..(3636294): a, c, g or t
  modified_base (3636526)..(3636529): a, c, g or t
  modified_base (3636533)..(3636538): a, c, g or t
  modified_base (3636851)..(3636851): a, c, g or t
  modified_base (3637361)..(3637361): a, c, g or t
  modified_base (3637995)..(3637998): a, c, g or t
  modified_base (3639140)..(3639140): a, c, g or t
  modified_base (3639674)..(3639674): a, c, g or t
  modified_base (3643396)..(3643396): a, c, g or t
  modified_base (3643552)..(3643559): a, c, g or t
  modified_base (3643757)..(3643765): a, c, g or t
  modified_base (3644226)..(3644226): a, c, g or t
  modified_base (3646706)..(3646713): a, c, g or t
  modified_base (3647755)..(3647755): a, c, g or t
  modified_base (3648202)..(3648202): a, c, g or t
  modified_base (3648745)..(3648745): a, c, g or t
  modified_base (3649348)..(3649348): a, c, g or t
  modified_base (3649440)..(3649440): a, c, g or t
  modified_base (3650389)..(3650389): a, c, g or t
  modified_base (3652088)..(3652088): a, c, g or t
  modified_base (3657114)..(3657114): a, c, g or t
  modified_base (3657347)..(3657347): a, c, g or t
  modified_base (3658112)..(3658113): a, c, g or t
  modified_base (3658116)..(3658117): a, c, g or t
  modified_base (3658119)..(3658124): a, c, g or t
  modified_base (3658178)..(3658197): a, c, g or t
  modified_base (3663549)..(3663549): a, c, g or t
  modified_base (3663777)..(3663777): a, c, g or t
  modified_base (3666444)..(3666444): a, c, g or t
  modified_base (3668485)..(3668485): a, c, g or t
  modified_base (3668515)..(3668515): a, c, g or t
  modified_base (3669368)..(3669371): a, c, g or t
  modified_base (3671456)..(3671456): a, c, g or t
  modified_base (3672890)..(3672890): a, c, g or t
  modified_base (3674123)..(3674123): a, c, g or t
  modified_base (3674813)..(3674813): a, c, g or t
  modified_base (3676512)..(3676512): a, c, g or t
  modified_base (3676817)..(3676817): a, c, g or t
  modified_base (3677955)..(3677955): a, c, g or t
  modified_base (3679852)..(3679852): a, c, g or t
  modified_base (3681271)..(3681275): a, c, g or t
  modified_base (3681835)..(3681835): a, c, g or t
  modified_base (3682789)..(3682789): a, c, g or t
  modified_base (3683579)..(3683582): a, c, g or t
  modified_base (3684054)..(3684055): a, c, g or t
  modified_base (3684575)..(3684575): a, c, g or t
  modified_base (3685071)..(3685071): a, c, g or t
  modified_base (3685488)..(3685488): a, c, g or t
  modified_base (3688431)..(3688431): a, c, g or t
  modified_base (3689411)..(3689411): a, c, g or t
  modified_base (3691407)..(3691407): a, c, g or t
  modified_base (3693291)..(3693291): a, c, g or t
  modified_base (3693996)..(3694001): a, c, g or t
  modified_base (3695551)..(3695551): a, c, g or t
  modified_base (3695567)..(3695567): a, c, g or t
  modified_base (3696854)..(3696854): a, c, g or t
  modified_base (3701656)..(3701668): a, c, g or t
  modified_base (3702790)..(3702790): a, c, g or t
  modified_base (3706152)..(3706152): a, c, g or t
  modified_base (3706157)..(3706157): a, c, g or t
  modified_base (3712369)..(3712370): a, c, g or t
  modified_base (3712374)..(3712375): a, c, g or t
  modified_base (3712377)..(3712378): a, c, g or t
  modified_base (3716735)..(3716735): a, c, g or t
  modified_base (3719758)..(3719765): a, c, g or t
  modified_base (3720717)..(3720718): a, c, g or t
  modified_base (3723666)..(3723666): a, c, g or t
  modified_base (3726007)..(3726007): a, c, g or t
  modified_base (3726465)..(3726465): a, c, g or t
  modified_base (3728336)..(3728336): a, c, g or t
  modified_base (3729176)..(3729176): a, c, g or t
  modified_base (3730560)..(3730560): a, c, g or t
  modified_base (3732921)..(3732921): a, c, g or t
  modified_base (3736595)..(3736595): a, c, g or t
  modified_base (3737340)..(3737340): a, c, g or t
  modified_base (3737369)..(3737369): a, c, g or t
  modified_base (3737738)..(3737738): a, c, g or t
  modified_base (3738314)..(3738317): a, c, g or t
  modified_base (3738543)..(3738543): a, c, g or t
  modified_base (3739297)..(3739297): a, c, g or t
  modified_base (3744581)..(3744581): a, c, g or t
  modified_base (3745243)..(3745243): a, c, g or t
  modified_base (3746263)..(3746263): a, c, g or t
  modified_base (3746382)..(3746382): a, c, g or t
  modified_base (3749405)..(3749406): a, c, g or t
  modified_base (3749712)..(3749712): a, c, g or t
  modified_base (3749756)..(3749760): a, c, g or t
  modified_base (3752578)..(3752578): a, c, g or t
  modified_base (3753132)..(3753132): a, c, g or t
  modified_base (3754082)..(3754087): a, c, g or t
  modified_base (3755319)..(3755319): a, c, g or t
  modified_base (3755895)..(3755895): a, c, g or t
  modified_base (3757956)..(3757956): a, c, g or t
  modified_base (3760115)..(3760115): a, c, g or t
  modified_base (3761391)..(3761395): a, c, g or t
  modified_base (3761398)..(3761399): a, c, g or t
  modified_base (3762798)..(3762798): a, c, g or t
  modified_base (3763915)..(3763915): a, c, g or t
  modified_base (3764143)..(3764143): a, c, g or t
  modified_base (3769877)..(3769882): a, c, g or t
  modified_base (3772608)..(3772608): a, c, g or t
  modified_base (3772612)..(3772612): a, c, g or t
  modified_base (3773026)..(3773026): a, c, g or t
  modified_base (3773324)..(3773344): a, c, g or t
  modified_base (3773347)..(3773351): a, c, g or t
  modified_base (3773850)..(3773850): a, c, g or t
  modified_base (3774358)..(3774361): a, c, g or t
  modified_base (3776468)..(3776471): a, c, g or t
  modified_base (3778759)..(3778759): a, c, g or t
  modified_base (3781398)..(3781398): a, c, g or t
  modified_base (3781968)..(3781968): a, c, g or t
  modified_base (3782124)..(3782124): a, c, g or t
  modified_base (3783077)..(3783077): a, c, g or t
  modified_base (3783267)..(3783268): a, c, g or t
  modified_base (3785227)..(3785228): a, c, g or t
  modified_base (3785231)..(3785231): a, c, g or t
  modified_base (3787014)..(3787015): a, c, g or t
  modified_base (3787038)..(3787038): a, c, g or t
  modified_base (3787056)..(3787057): a, c, g or t
  modified_base (3787241)..(3787241): a, c, g or t
  modified_base (3787291)..(3787291): a, c, g or t
  modified_base (3787293)..(3787294): a, c, g or t
  modified_base (3787470)..(3787470): a, c, g or t
  modified_base (3788907)..(3788910): a, c, g or t
  modified_base (3789329)..(3789330): a, c, g or t
  modified_base (3789478)..(3789479): a, c, g or t
  modified_base (3789495)..(3789495): a, c, g or t
  modified_base (3789530)..(3789559): a, c, g or t
  modified_base (3789727)..(3789728): a, c, g or t
  modified_base (3789804)..(3789805): a, c, g or t
  modified_base (3789809)..(3789810): a, c, g or t
  modified_base (3789838)..(3789838): a, c, g or t
  modified_base (3789919)..(3789920): a, c, g or t
  modified_base (3790096)..(3790096): a, c, g or t
  modified_base (3790101)..(3790101): a, c, g or t
  modified_base (3790103)..(3790121): a, c, g or t
  modified_base (3790126)..(3790126): a, c, g or t
  modified_base (3790149)..(3790150): a, c, g or t
  modified_base (3790154)..(3790155): a, c, g or t
  modified_base (3790378)..(3790381): a, c, g or t
  modified_base (3790515)..(3790515): a, c, g or t
  modified_base (3790887)..(3790887): a, c, g or t
  modified_base (3791034)..(3791034): a, c, g or t
  modified_base (3791193)..(3791212): a, c, g or t
  modified_base (3792368)..(3792408): a, c, g or t
  modified_base (3796022)..(3796022): a, c, g or t
  modified_base (3797264)..(3797264): a, c, g or t
  modified_base (3799100)..(3799100): a, c, g or t
  modified_base (3800648)..(3800648): a, c, g or t
  modified_base (3802297)..(3802297): a, c, g or t
  modified_base (3802915)..(3802924): a, c, g or t
  modified_base (3812708)..(3812708): a, c, g or t
  modified_base (3813834)..(3813834): a, c, g or t
  modified_base (3817355)..(3817355): a, c, g or t
  modified_base (3818053)..(3818056): a, c, g or t
  modified_base (3818329)..(3818336): a, c, g or t
  modified_base (3820931)..(3820931): a, c, g or t
  modified_base (3822851)..(3822851): a, c, g or t
  modified_base (3823536)..(3823536): a, c, g or t
  modified_base (3824349)..(3824349): a, c, g or t
  modified_base (3824796)..(3824796): a, c, g or t
  modified_base (3824934)..(3824934): a, c, g or t
  modified_base (3826097)..(3826114): a, c, g or t
  modified_base (3828883)..(3828883): a, c, g or t
  modified_base (3831264)..(3831264): a, c, g or t
  modified_base (3831266)..(3831266): a, c, g or t
  modified_base (3831718)..(3831719): a, c, g or t
  modified_base (3832785)..(3832785): a, c, g or t
  modified_base (3835626)..(3835626): a, c, g or t
  modified_base (3837116)..(3837116): a, c, g or t
  modified_base (3839937)..(3839940): a, c, g or t
  modified_base (3839944)..(3839944): a, c, g or t
  modified_base (3843435)..(3843435): a, c, g or t
  modified_base (3844400)..(3844400): a, c, g or t
  modified_base (3844423)..(3844423): a, c, g or t
  modified_base (3844426)..(3844426): a, c, g or t
  modified_base (3844456)..(3844456): a, c, g or t
  modified_base (3850671)..(3850680): a, c, g or t
  modified_base (3850682)..(3850683): a, c, g or t
  modified_base (3850711)..(3850711): a, c, g or t
  modified_base (3853605)..(3853605): a, c, g or t
  modified_base (3858660)..(3858664): a, c, g or t
  modified_base (3861164)..(3861167): a, c, g or t
  modified_base (3874142)..(3874142): a, c, g or t
  modified_base (3877944)..(3877948): a, c, g or t
  modified_base (3884540)..(3884540): a, c, g or t
  modified_base (3887677)..(3887677): a, c, g or t
  modified_base (3888557)..(3888557): a, c, g or t
  modified_base (3890393)..(3890393): a, c, g or t
  modified_base (3894806)..(3894806): a, c, g or t
  modified_base (3894926)..(3894926): a, c, g or t
  modified_base (3897086)..(3897086): a, c, g or t
  modified_base (3899568)..(3899568): a, c, g or t
  modified_base (3899965)..(3899965): a, c, g or t
  modified_base (3900594)..(3900594): a, c, g or t
  modified_base (3902788)..(3902788): a, c, g or t
  modified_base (3903037)..(3903037): a, c, g or t
  modified_base (3903050)..(3903050): a, c, g or t
  modified_base (3903053)..(3903053): a, c, g or t
  modified_base (3904432)..(3904432): a, c, g or t
  modified_base (3904434)..(3904434): a, c, g or t
  modified_base (3906095)..(3906100): a, c, g or t
  modified_base (3906109)..(3906109): a, c, g or t
  modified_base (3908783)..(3908783): a, c, g or t
  modified_base (3908950)..(3908950): a, c, g or t
  modified_base (3913247)..(3913247): a, c, g or t
  modified_base (3914455)..(3914455): a, c, g or t
  modified_base (3914723)..(3914723): a, c, g or t
  modified_base (3914744)..(3914744): a, c, g or t
  modified_base (3921334)..(3921346): a, c, g or t
  modified_base (3924175)..(3924175): a, c, g or t
  modified_base (3924338)..(3924338): a, c, g or t
  modified_base (3925305)..(3925308): a, c, g or t
  modified_base (3926179)..(3926184): a, c, g or t
  modified_base (3930223)..(3930226): a, c, g or t
  modified_base (3930933)..(3930933): a, c, g or t
  modified_base (3931005)..(3931005): a, c, g or t
  modified_base (3931033)..(3931042): a, c, g or t
  modified_base (3932814)..(3932814): a, c, g or t
  modified_base (3933174)..(3933174): a, c, g or t
  modified_base (3933605)..(3933605): a, c, g or t
  modified_base (3934766)..(3934773): a, c, g or t
  modified_base (3936018)..(3936018): a, c, g or t
  modified_base (3936919)..(3936924): a, c, g or t
  modified_base (3946319)..(3946319): a, c, g or t
  modified_base (3950737)..(3950743): a, c, g or t
  modified_base (3954681)..(3954681): a, c, g or t
  modified_base (3954690)..(3954690): a, c, g or t
  modified_base (3960574)..(3960574): a, c, g or t
  modified_base (3960576)..(3960577): a, c, g or t
  modified_base (3960580)..(3960581): a, c, g or t
  modified_base (3963507)..(3963510): a, c, g or t
  modified_base (3963670)..(3963679): a, c, g or t
  modified_base (3964224)..(3964224): a, c, g or t
  modified_base (3966262)..(3966262): a, c, g or t
  modified_base (3967086)..(3967086): a, c, g or t
  modified_base (3970568)..(3970568): a, c, g or t
  modified_base (3971338)..(3971338): a, c, g or t
  modified_base (3972407)..(3972408): a, c, g or t
  modified_base (3975795)..(3975795): a, c, g or t
  modified_base (3977416)..(3977416): a, c, g or t
  modified_base (3977859)..(3977859): a, c, g or t
  modified_base (3978946)..(3978949): a, c, g or t
  modified_base (3979298)..(3979298): a, c, g or t
  modified_base (3983744)..(3983747): a, c, g or t
  modified_base (3983749)..(3983753): a, c, g or t
  modified_base (3986716)..(3986719): a, c, g or t
  modified_base (3986794)..(3986794): a, c, g or t
  modified_base (3987735)..(3987749): a, c, g or t
  modified_base (3987842)..(3987842): a, c, g or t
  modified_base (3990404)..(3990406): a, c, g or t
  modified_base (3992861)..(3992862): a, c, g or t
  modified_base (3992869)..(3992870): a, c, g or t
  modified_base (3993115)..(3993115): a, c, g or t
  modified_base (3993336)..(3993336): a, c, g or t
  modified_base (3995518)..(3995518): a, c, g or t
  modified_base (3995532)..(3995532): a, c, g or t
  modified_base (3996677)..(3996677): a, c, g or t
  modified_base (3996942)..(3996942): a, c, g or t
  modified_base (3999655)..(3999658): a, c, g or t
  modified_base (4000321)..(4000321): a, c, g or t
  modified_base (4001798)..(4001798): a, c, g or t
  modified_base (4002296)..(4002296): a, c, g or t
  modified_base (4002685)..(4002688): a, c, g or t
  modified_base (4004528)..(4004528): a, c, g or t
  modified_base (4008432)..(4008432): a, c, g or t
  modified_base (4010113)..(4010113): a, c, g or t
  modified_base (4012579)..(4012579): a, c, g or t
  modified_base (4013833)..(4013836): a, c, g or t
  modified_base (4015561)..(4015561): a, c, g or t
  modified_base (4016117)..(4016117): a, c, g or t
  modified_base (4016979)..(4016979): a, c, g or t
  modified_base (4017458)..(4017458): a, c, g or t
  modified_base (4017462)..(4017465): a, c, g or t
  modified_base (4019776)..(4019776): a, c, g or t
  modified_base (4019844)..(4019844): a, c, g or t
  modified_base (4024915)..(4024915): a, c, g or t
  modified_base (4031924)..(4031924): a, c, g or t
  modified_base (4035174)..(4035176): a, c, g or t
  modified_base (4035285)..(4035285): a, c, g or t
  modified_base (4035287)..(4035290): a, c, g or t
  modified_base (4035655)..(4035655): a, c, g or t
  modified_base (4035980)..(4035982): a, c, g or t
  modified_base (4038156)..(4038157): a, c, g or t
  modified_base (4038163)..(4038164): a, c, g or t
  modified_base (4038511)..(4038511): a, c, g or t
  modified_base (4040265)..(4040268): a, c, g or t
  modified_base (4040781)..(4040786): a, c, g or t
  modified_base (4041998)..(4041998): a, c, g or t
  modified_base (4045936)..(4045936): a, c, g or t
  modified_base (4046602)..(4046607): a, c, g or t
  modified_base (4048022)..(4048022): a, c, g or t
  modified_base (4050349)..(4050352): a, c, g or t
  modified_base (4050354)..(4050361): a, c, g or t
  modified_base (4050488)..(4050488): a, c, g or t
  modified_base (4050538)..(4050538): a, c, g or t
  modified_base (4054044)..(4054044): a, c, g or t
  modified_base (4054048)..(4054048): a, c, g or t
  modified_base (4055721)..(4055721): a, c, g or t
  modified_base (4059227)..(4059227): a, c, g or t
  modified_base (4060133)..(4060136): a, c, g or t
  modified_base (4060316)..(4060316): a, c, g or t
  modified_base (4061123)..(4061123): a, c, g or t
  modified_base (4062799)..(4062799): a, c, g or t
  modified_base (4062814)..(4062817): a, c, g or t
  modified_base (4062819)..(4062827): a, c, g or t
  modified_base (4062829)..(4062829): a, c, g or t
  modified_base (4063007)..(4063007): a, c, g or t
  modified_base (4063998)..(4063998): a, c, g or t
  modified_base (4064198)..(4064198): a, c, g or t
  modified_base (4064508)..(4064508): a, c, g or t
  modified_base (4065137)..(4065137): a, c, g or t
  modified_base (4066502)..(4066502): a, c, g or t
  modified_base (4067150)..(4067152): a, c, g or t
  modified_base (4068856)..(4068856): a, c, g or t
  modified_base (4069910)..(4069910): a, c, g or t
  modified_base (4069999)..(4069999): a, c, g or t
  modified_base (4071301)..(4071301): a, c, g or t
  modified_base (4072578)..(4072578): a, c, g or t
  modified_base (4075509)..(4075510): a, c, g or t
  modified_base (4075514)..(4075527): a, c, g or t
  modified_base (4076960)..(4076960): a, c, g or t
  modified_base (4080724)..(4080724): a, c, g or t
  modified_base (4081575)..(4081577): a, c, g or t
  modified_base (4083432)..(4083436): a, c, g or t
  modified_base (4084554)..(4084555): a, c, g or t
  modified_base (4085103)..(4085103): a, c, g or t
  modified_base (4085794)..(4085795): a, c, g or t
  modified_base (4085797)..(4085801): a, c, g or t
  modified_base (4086056)..(4086056): a, c, g or t
  modified_base (4086447)..(4086489): a, c, g or t
  modified_base (4086561)..(4086564): a, c, g or t
  modified_base (4086566)..(4086567): a, c, g or t
  modified_base (4086569)..(4086575): a, c, g or t
  modified_base (4086615)..(4086615): a, c, g or t
  modified_base (4086638)..(4086664): a, c, g or t
  modified_base (4089158)..(4089162): a, c, g or t
  modified_base (4090552)..(4090556): a, c, g or t
  modified_base (4091083)..(4091083): a, c, g or t
  modified_base (4092116)..(4092116): a, c, g or t
  modified_base (4096282)..(4096283): a, c, g or t
  modified_base (4097943)..(4097943): a, c, g or t
  modified_base (4098808)..(4098808): a, c, g or t
  modified_base (4098810)..(4098810): a, c, g or t
  modified_base (4101840)..(4101840): a, c, g or t
  modified_base (4102972)..(4102972): a, c, g or t
  modified_base (4104803)..(4104803): a, c, g or t
  modified_base (4109413)..(4109420): a, c, g or t
  modified_base (4112380)..(4112380): a, c, g or t
  modified_base (4112396)..(4112396): a, c, g or t
  modified_base (4115510)..(4115510): a, c, g or t
  modified_base (4121518)..(4121518): a, c, g or t
  modified_base (4121633)..(4121640): a, c, g or t
  modified_base (4121642)..(4121643): a, c, g or t
  modified_base (4127680)..(4127682): a, c, g or t
  modified_base (4128947)..(4128947): a, c, g or t
  modified_base (4129023)..(4129032): a, c, g or t
  modified_base (4129035)..(4129036): a, c, g or t
  modified_base (4129063)..(4129063): a, c, g or t
  modified_base (4129066)..(4129088): a, c, g or t
  modified_base (4131291)..(4131291): a, c, g or t
  modified_base (4131865)..(4131868): a, c, g or t
  modified_base (4133339)..(4133351): a, c, g or t
  modified_base (4133434)..(4133437): a, c, g or t
  modified_base (4133439)..(4133439): a, c, g or t
  modified_base (4133447)..(4133452): a, c, g or t
  modified_base (4133480)..(4133483): a, c, g or t
  modified_base (4133486)..(4133486): a, c, g or t
  modified_base (4133909)..(4133912): a, c, g or t
  modified_base (4133999)..(4133999): a, c, g or t
  modified_base (4134001)..(4134039): a, c, g or t
  modified_base (4134189)..(4134232): a, c, g or t
  modified_base (4136391)..(4136391): a, c, g or t
  modified_base (4136495)..(4136495): a, c, g or t
  modified_base (4136613)..(4136616): a, c, g or t
  modified_base (4136642)..(4136642): a, c, g or t
  modified_base (4136647)..(4136647): a, c, g or t
  modified_base (4136659)..(4136659): a, c, g or t
  modified_base (4136675)..(4136675): a, c, g or t
  modified_base (4136687)..(4136689): a, c, g or t
  modified_base (4137593)..(4137593): a, c, g or t
  modified_base (4138145)..(4138145): a, c, g or t
  modified_base (4138260)..(4138265): a, c, g or t
  modified_base (4140203)..(4140205): a, c, g or t
  modified_base (4143913)..(4143913): a, c, g or t
  modified_base (4144240)..(4144240): a, c, g or t
  modified_base (4147434)..(4147434): a, c, g or t
  modified_base (4150756)..(4150756): a, c, g or t
  modified_base (4150894)..(4150898): a, c, g or t
  modified_base (4152683)..(4152688): a, c, g or t
  modified_base (4153747)..(4153747): a, c, g or t
  modified_base (4153797)..(4153797): a, c, g or t
  modified_base (4156947)..(4156950): a, c, g or t
  modified_base (4157626)..(4157626): a, c, g or t
  modified_base (4159093)..(4159093): a, c, g or t
  modified_base (4160362)..(4160362): a, c, g or t
  modified_base (4163495)..(4163495): a, c, g or t
  modified_base (4165620)..(4165630): a, c, g or t
  modified_base (4166106)..(4166114): a, c, g or t
  modified_base (4168353)..(4168358): a, c, g or t
  modified_base (4170275)..(4170280): a, c, g or t
  modified_base (4172758)..(4172761): a, c, g or t
  modified_base (4173493)..(4173496): a, c, g or t
  modified_base (4175329)..(4175330): a, c, g or t
  modified_base (4176591)..(4176591): a, c, g or t
  modified_base (4178728)..(4178738): a, c, g or t
  modified_base (4182341)..(4182341): a, c, g or t
  modified_base (4182720)..(4182720): a, c, g or t
  modified_base (4183015)..(4183015): a, c, g or t
  modified_base (4184116)..(4184116): a, c, g or t
  modified_base (4185415)..(4185415): a, c, g or t
  modified_base (4185451)..(4185451): a, c, g or t
  modified_base (4185623)..(4185623): a, c, g or t
  modified_base (4187001)..(4187001): a, c, g or t
  modified_base (4187124)..(4187134): a, c, g or t
  modified_base (4188206)..(4188206): a, c, g or t
  modified_base (4188966)..(4188970): a, c, g or t
  modified_base (4190703)..(4190705): a, c, g or t
  modified_base (4193923)..(4193923): a, c, g or t
  modified_base (4195579)..(4195579): a, c, g or t
  modified_base (4197276)..(4197276): a, c, g or t
  modified_base (4202516)..(4202516): a, c, g or t
  modified_base (4202799)..(4202799): a, c, g or t
  modified_base (4206514)..(4206514): a, c, g or t
  modified_base (4211090)..(4211090): a, c, g or t
  modified_base (4213397)..(4213397): a, c, g or t
  modified_base (4213403)..(4213404): a, c, g or t
  modified_base (4213443)..(4213443): a, c, g or t
  modified_base (4213447)..(4213454): a, c, g or t
  modified_base (4213456)..(4213459): a, c, g or t
  modified_base (4213502)..(4213507): a, c, g or t
  modified_base (4213511)..(4213518): a, c, g or t
  modified_base (4213554)..(4213593): a, c, g or t
  modified_base (4213617)..(4213617): a, c, g or t
  modified_base (4213701)..(4213741): a, c, g or t
  modified_base (4214745)..(4214745): a, c, g or t
  modified_base (4215123)..(4215123): a, c, g or t
  modified_base (4215210)..(4215210): a, c, g or t
  modified_base (4215592)..(4215593): a, c, g or t
  modified_base (4215715)..(4215716): a, c, g or t
  modified_base (4216569)..(4216615): a, c, g or t
  modified_base (4216620)..(4216621): a, c, g or t
  modified_base (4216629)..(4216631): a, c, g or t
  modified_base (4216637)..(4216650): a, c, g or t
  modified_base (4216692)..(4216692): a, c, g or t
  modified_base (4216694)..(4216695): a, c, g or t
  modified_base (4216726)..(4216727): a, c, g or t
  modified_base (4216731)..(4216733): a, c, g or t
  modified_base (4216735)..(4216746): a, c, g or t
  modified_base (4216761)..(4216762): a, c, g or t
  modified_base (4216764)..(4216767): a, c, g or t
  modified_base (4216769)..(4216813): a, c, g or t
  modified_base (4216944)..(4216945): a, c, g or t
  modified_base (4216975)..(4216976): a, c, g or t
  modified_base (4216983)..(4216985): a, c, g or t
  modified_base (4216987)..(4216988): a, c, g or t
  modified_base (4217537)..(4217537): a, c, g or t
  modified_base (4219537)..(4219538): a, c, g or t
  modified_base (4221150)..(4221150): a, c, g or t
  modified_base (4221955)..(4221958): a, c, g or t
  modified_base (4221970)..(4221970): a, c, g or t
  modified_base (4222826)..(4222826): a, c, g or t
  modified_base (4223591)..(4223591): a, c, g or t
  modified_base (4223932)..(4223932): a, c, g or t
  modified_base (4226380)..(4226381): a, c, g or t
  modified_base (4226383)..(4226388): a, c, g or t
  modified_base (4226390)..(4226390): a, c, g or t
  modified_base (4227001)..(4227004): a, c, g or t
  modified_base (4227006)..(4227007): a, c, g or t
  modified_base (4227012)..(4227015): a, c, g or t
  modified_base (4229047)..(4229050): a, c, g or t
  modified_base (4229181)..(4229182): a, c, g or t
  modified_base (4229184)..(4229185): a, c, g or t
  modified_base (4231825)..(4231831): a, c, g or t
  modified_base (4232464)..(4232472): a, c, g or t
  modified_base (4236266)..(4236275): a, c, g or t
  modified_base (4237188)..(4237188): a, c, g or t
  modified_base (4240011)..(4240011): a, c, g or t
  modified_base (4241481)..(4241490): a, c, g or t
  modified_base (4243152)..(4243156): a, c, g or t
  modified_base (4243285)..(4243286): a, c, g or t
  modified_base (4243288)..(4243300): a, c, g or t
  modified_base (4245197)..(4245200): a, c, g or t
  modified_base (4245343)..(4245344): a, c, g or t
  modified_base (4245346)..(4245349): a, c, g or t
  modified_base (4245537)..(4245537): a, c, g or t
  modified_base (4245901)..(4245908): a, c, g or t
  modified_base (4245934)..(4245938): a, c, g or t
  modified_base (4246462)..(4246462): a, c, g or t
  modified_base (4247419)..(4247419): a, c, g or t
  modified_base (4247617)..(4247628): a, c, g or t
  modified_base (4248105)..(4248118): a, c, g or t
  modified_base (4248441)..(4248442): a, c, g or t
  modified_base (4248444)..(4248458): a, c, g or t
  modified_base (4248592)..(4248596): a, c, g or t
  modified_base (4253637)..(4253637): a, c, g or t
  modified_base (4255066)..(4255066): a, c, g or t
  modified_base (4256268)..(4256273): a, c, g or t
  modified_base (4258491)..(4258491): a, c, g or t
  modified_base (4261084)..(4261084): a, c, g or t
  modified_base (4261087)..(4261090): a, c, g or t
  modified_base (4261604)..(4261604): a, c, g or t
  modified_base (4262390)..(4262390): a, c, g or t
  modified_base (4262608)..(4262608): a, c, g or t
  modified_base (4262659)..(4262659): a, c, g or t
  modified_base (4264315)..(4264315): a, c, g or t
  modified_base (4264320)..(4264320): a, c, g or t
  modified_base (4266587)..(4266587): a, c, g or t
  modified_base (4266897)..(4266900): a, c, g or t
  modified_base (4267015)..(4267020): a, c, g or t
  modified_base (4269449)..(4269449): a, c, g or t
  modified_base (4269591)..(4269591): a, c, g or t
  modified_base (4269695)..(4269695): a, c, g or t
  modified_base (4270776)..(4270780): a, c, g or t
  modified_base (4270960)..(4270960): a, c, g or t
  modified_base (4273008)..(4273011): a, c, g or t
  modified_base (4274469)..(4274469): a, c, g or t
  modified_base (4275964)..(4275964): a, c, g or t
  modified_base (4276770)..(4276770): a, c, g or t
  modified_base (4281996)..(4281999): a, c, g or t
  modified_base (4282054)..(4282055): a, c, g or t
  modified_base (4282915)..(4282915): a, c, g or t
  modified_base (4283118)..(4283118): a, c, g or t
  modified_base (4283221)..(4283221): a, c, g or t
  modified_base (4292323)..(4292323): a, c, g or t
  modified_base (4292437)..(4292445): a, c, g or t
  modified_base (4292472)..(4292472): a, c, g or t
  modified_base (4293342)..(4293342): a, c, g or t
  modified_base (4293741)..(4293741): a, c, g or t
  modified_base (4297600)..(4297600): a, c, g or t
  modified_base (4298697)..(4298697): a, c, g or t
  modified_base (4300536)..(4300536): a, c, g or t
  modified_base (4301052)..(4301052): a, c, g or t
  modified_base (4302753)..(4302753): a, c, g or t
  modified_base (4308536)..(4308536): a, c, g or t
  modified_base (4309143)..(4309143): a, c, g or t
  modified_base (4310258)..(4310258): a, c, g or t
  modified_base (4311481)..(4311481): a, c, g or t
  modified_base (4314361)..(4314361): a, c, g or t
  modified_base (4316166)..(4316176): a, c, g or t
  modified_base (4316491)..(4316492): a, c, g or t
  modified_base (4317117)..(4317120): a, c, g or t
  modified_base (4318209)..(4318210): a, c, g or t
  modified_base (4318212)..(4318228): a, c, g or t
  modified_base (4318231)..(4318231): a, c, g or t
  modified_base (4319050)..(4319056): a, c, g or t
  modified_base (4320287)..(4320298): a, c, g or t
  modified_base (4322877)..(4322877): a, c, g or t
  modified_base (4327522)..(4327524): a, c, g or t
  modified_base (4331142)..(4331142): a, c, g or t
  modified_base (4331327)..(4331327): a, c, g or t
  modified_base (4331977)..(4331992): a, c, g or t
  modified_base (4332733)..(4332736): a, c, g or t
  modified_base (4334694)..(4334694): a, c, g or t
  modified_base (4334734)..(4334734): a, c, g or t
  modified_base (4338113)..(4338113): a, c, g or t
  modified_base (4341491)..(4341499): a, c, g or t
  modified_base (4343482)..(4343486): a, c, g or t
  modified_base (4343729)..(4343730): a, c, g or t
  modified_base (4343733)..(4343740): a, c, g or t
  modified_base (4343743)..(4343744): a, c, g or t
  modified_base (4351958)..(4351961): a, c, g or t
  modified_base (4354862)..(4354862): a, c, g or t
  modified_base (4354866)..(4354867): a, c, g or t
  modified_base (4355754)..(4355754): a, c, g or t
  modified_base (4356578)..(4356578): a, c, g or t
  modified_base (4360844)..(4360853): a, c, g or t
  modified_base (4362914)..(4362941): a, c, g or t
  modified_base (4362943)..(4362944): a, c, g or t
  modified_base (4362948)..(4362949): a, c, g or t
  modified_base (4362970)..(4362972): a, c, g or t
  modified_base (4363368)..(4363368): a, c, g or t
  modified_base (4363770)..(4363773): a, c, g or t
  modified_base (4364122)..(4364122): a, c, g or t
  modified_base (4364324)..(4364324): a, c, g or t
  modified_base (4364358)..(4364358): a, c, g or t
  modified_base (4364491)..(4364491): a, c, g or t
  modified_base (4364564)..(4364571): a, c, g or t
  modified_base (4364574)..(4364575): a, c, g or t
  modified_base (4364636)..(4364639): a, c, g or t
  modified_base (4364723)..(4364724): a, c, g or t
  modified_base (4365017)..(4365018): a, c, g or t
  modified_base (4365055)..(4365057): a, c, g or t
  modified_base (4367182)..(4367186): a, c, g or t
  modified_base (4370884)..(4370887): a, c, g or t
  modified_base (4370890)..(4370894): a, c, g or t
  modified_base (4374117)..(4374130): a, c, g or t
  modified_base (4374286)..(4374289): a, c, g or t
  modified_base (4374946)..(4374949): a, c, g or t
  modified_base (4375481)..(4375481): a, c, g or t
  modified_base (4376940)..(4376948): a, c, g or t
  modified_base (4376958)..(4376958): a, c, g or t
  modified_base (4380101)..(4380101): a, c, g or t
  modified_base (4381192)..(4381195): a, c, g or t
  modified_base (4381533)..(4381533): a, c, g or t
  modified_base (4388125)..(4388125): a, c, g or t
  modified_base (4388189)..(4388189): a, c, g or t
  modified_base (4393445)..(4393445): a, c, g or t
  modified_base (4393585)..(4393585): a, c, g or t
  modified_base (4395708)..(4395708): a, c, g or t
  modified_base (4396149)..(4396161): a, c, g or t
  modified_base (4396365)..(4396365): a, c, g or t
  modified_base (4398348)..(4398354): a, c, g or t
  modified_base (4401473)..(4401473): a, c, g or t
  modified_base (4402946)..(4402946): a, c, g or t
  modified_base (4403973)..(4403976): a, c, g or t
  modified_base (4404853)..(4404853): a, c, g or t
  modified_base (4404889)..(4404892): a, c, g or t
  modified_base (4405024)..(4405031): a, c, g or t
  modified_base (4405134)..(4405134): a, c, g or t
  modified_base (4406849)..(4406853): a, c, g or t
  modified_base (4408273)..(4408273): a, c, g or t
  modified_base (4410635)..(4410638): a, c, g or t
  modified_base (4411298)..(4411298): a, c, g or t
  modified_base (4411347)..(4411347): a, c, g or t
  modified_base (4411439)..(4411439): a, c, g or t
  modified_base (4411811)..(4411814): a, c, g or t
  modified_base (4412444)..(4412444): a, c, g or t
  modified_base (4412852)..(4412852): a, c, g or t
  modified_base (4413334)..(4413334): a, c, g or t
  modified_base (4415437)..(4415437): a, c, g or t
  modified_base (4416096)..(4416096): a, c, g or t
  modified_base (4416354)..(4416358): a, c, g or t
  modified_base (4416583)..(4416583): a, c, g or t
  modified_base (4416642)..(4416647): a, c, g or t
  modified_base (4418178)..(4418178): a, c, g or t
  modified_base (4419825)..(4419825): a, c, g or t
  modified_base (4420656)..(4420656): a, c, g or t
  modified_base (4421247)..(4421247): a, c, g or t
  modified_base (4421739)..(4421741): a, c, g or t
  modified_base (4422718)..(4422724): a, c, g or t
  modified_base (4424750)..(4424750): a, c, g or t
  modified_base (4425463)..(4425463): a, c, g or t
  modified_base (4426199)..(4426201): a, c, g or t
  modified_base (4426548)..(4426554): a, c, g or t
  modified_base (4427677)..(4427677): a, c, g or t
  modified_base (4429144)..(4429145): a, c, g or t
  modified_base (4431768)..(4431768): a, c, g or t
  modified_base (4436161)..(4436161): a, c, g or t
  modified_base (4436210)..(4436210): a, c, g or t
  modified_base (4436272)..(4436272): a, c, g or t
  modified_base (4437597)..(4437597): a, c, g or t
  modified_base (4441228)..(4441229): a, c, g or t
  modified_base (4441358)..(4441358): a, c, g or t
  modified_base (4445254)..(4445254): a, c, g or t
  modified_base (4446377)..(4446377): a, c, g or t
  modified_base (4446944)..(4446944): a, c, g or t
  modified_base (4447896)..(4447898): a, c, g or t
  modified_base (4448897)..(4448901): a, c, g or t
  modified_base (4449676)..(4449676): a, c, g or t
  modified_base (4450679)..(4450679): a, c, g or t
  modified_base (4451768)..(4451771): a, c, g or t
  modified_base (4452306)..(4452306): a, c, g or t
  modified_base (4454140)..(4454140): a, c, g or t
  modified_base (4454355)..(4454355): a, c, g or t
  modified_base (4458313)..(4458316): a, c, g or t
  modified_base (4458410)..(4458410): a, c, g or t
  modified_base (4458428)..(4458428): a, c, g or t
  modified_base (4458471)..(4458471): a, c, g or t
  modified_base (4458473)..(4458517): a, c, g or t
  modified_base (4458807)..(4458807): a, c, g or t
  modified_base (4459001)..(4459001): a, c, g or t
  modified_base (4459092)..(4459097): a, c, g or t
  modified_base (4459099)..(4459100): a, c, g or t
  modified_base (4459401)..(4459401): a, c, g or t
  modified_base (4459857)..(4459863): a, c, g or t
  modified_base (4460352)..(4460357): a, c, g or t
  modified_base (4460603)..(4460631): a, c, g or t
  modified_base (4460748)..(4460749): a, c, g or t
  modified_base (4460776)..(4460776): a, c, g or t
  modified_base (4460786)..(4460788): a, c, g or t
  modified_base (4460961)..(4460993): a, c, g or t
  modified_base (4461009)..(4461009): a, c, g or t
  modified_base (4461061)..(4461061): a, c, g or t
  modified_base (4461076)..(4461076): a, c, g or t
  modified_base (4461178)..(4461206): a, c, g or t
  modified_base (4461257)..(4461260): a, c, g or t
  modified_base (4461264)..(4461264): a, c, g or t
  modified_base (4461401)..(4461402): a, c, g or t
  modified_base (4461407)..(4461408): a, c, g or t
  modified_base (4461998)..(4461999): a, c, g or t
  modified_base (4462307)..(4462307): a, c, g or t
  modified_base (4463209)..(4463212): a, c, g or t
  modified_base (4463285)..(4463286): a, c, g or t
  modified_base (4463290)..(4463291): a, c, g or t
  modified_base (4463298)..(4463300): a, c, g or t
  modified_base (4463439)..(4463440): a, c, g or t
  modified_base (4463446)..(4463447): a, c, g or t
  modified_base (4464757)..(4464757): a, c, g or t
  modified_base (4467049)..(4467052): a, c, g or t
  modified_base (4467332)..(4467333): a, c, g or t
  modified_base (4467555)..(4467563): a, c, g or t
  modified_base (4470324)..(4470324): a, c, g or t
  modified_base (4472388)..(4472388): a, c, g or t
  modified_base (4474738)..(4474738): a, c, g or t
  modified_base (4474892)..(4474892): a, c, g or t
  modified_base (4474908)..(4474912): a, c, g or t
  modified_base (4476261)..(4476261): a, c, g or t
  modified_base (4477226)..(4477234): a, c, g or t
  modified_base (4478088)..(4478088): a, c, g or t
  modified_base (4479363)..(4479363): a, c, g or t
  modified_base (4479395)..(4479398): a, c, g or t
  modified_base (4479402)..(4479403): a, c, g or t
  modified_base (4480103)..(4480104): a, c, g or t
  modified_base (4480107)..(4480113): a, c, g or t
  modified_base (4480177)..(4480177): a, c, g or t
  modified_base (4480894)..(4480894): a, c, g or t
  modified_base (4481445)..(4481445): a, c, g or t
  modified_base (4485031)..(4485034): a, c, g or t
  modified_base (4487656)..(4487656): a, c, g or t
  modified_base (4488282)..(4488282): a, c, g or t
  modified_base (4488336)..(4488340): a, c, g or t
  modified_base (4493995)..(4493995): a, c, g or t
  modified_base (4494853)..(4494856): a, c, g or t
  modified_base (4495277)..(4495277): a, c, g or t
  modified_base (4495392)..(4495392): a, c, g or t
  modified_base (4495445)..(4495445): a, c, g or t
  modified_base (4495471)..(4495471): a, c, g or t
  modified_base (4496134)..(4496146): a, c, g or t
  modified_base (4496231)..(4496231): a, c, g or t
  modified_base (4496311)..(4496311): a, c, g or t
  modified_base (4496340)..(4496340): a, c, g or t
  modified_base (4496518)..(4496521): a, c, g or t
  modified_base (4497167)..(4497167): a, c, g or t
  modified_base (4499012)..(4499012): a, c, g or t
  modified_base (4501685)..(4501685): a, c, g or t
  modified_base (4502383)..(4502383): a, c, g or t
  modified_base (4504186)..(4504189): a, c, g or t
  modified_base (4504892)..(4504892): a, c, g or t
  modified_base (4505163)..(4505163): a, c, g or t
  modified_base (4507625)..(4507625): a, c, g or t
  modified_base (4510304)..(4510304): a, c, g or t
  modified_base (4511183)..(4511183): a, c, g or t
  modified_base (4511556)..(4511562): a, c, g or t
  modified_base (4511996)..(4512004): a, c, g or t
  modified_base (4512561)..(4512563): a, c, g or t
  modified_base (4515950)..(4515950): a, c, g or t
  modified_base (4516205)..(4516205): a, c, g or t
  modified_base (4516949)..(4516952): a, c, g or t
  modified_base (4518733)..(4518733): a, c, g or t
  modified_base (4521693)..(4521698): a, c, g or t
  modified_base (4521759)..(4521806): a, c, g or t
  modified_base (4522230)..(4522231): a, c, g or t
  modified_base (4522774)..(4522774): a, c, g or t
  modified_base (4523685)..(4523685): a, c, g or t
  modified_base (4531418)..(4531418): a, c, g or t
  modified_base (4533797)..(4533797): a, c, g or t
  modified_base (4536652)..(4536653): a, c, g or t
  modified_base (4536932)..(4536932): a, c, g or t
  modified_base (4537462)..(4537462): a, c, g or t
  modified_base (4537467)..(4537467): a, c, g or t
  modified_base (4538314)..(4538314): a, c, g or t
  modified_base (4538398)..(4538398): a, c, g or t
  modified_base (4538767)..(4538770): a, c, g or t
  modified_base (4538772)..(4538773): a, c, g or t
  modified_base (4538943)..(4538943): a, c, g or t
  modified_base (4538966)..(4538966): a, c, g or t
  modified_base (4542381)..(4542381): a, c, g or t
  modified_base (4542384)..(4542384): a, c, g or t
  modified_base (4542732)..(4542733): a, c, g or t
  modified_base (4545446)..(4545446): a, c, g or t
  modified_base (4548671)..(4548671): a, c, g or t
  modified_base (4551545)..(4551548): a, c, g or t
  modified_base (4554481)..(4554481): a, c, g or t
  modified_base (4556026)..(4556035): a, c, g or t
  modified_base (4556221)..(4556221): a, c, g or t
  modified_base (4556287)..(4556287): a, c, g or t
  modified_base (4556320)..(4556320): a, c, g or t
  modified_base (4556770)..(4556771): a, c, g or t
  modified_base (4556853)..(4556856): a, c, g or t
  modified_base (4556859)..(4556860): a, c, g or t
  modified_base (4556889)..(4556890): a, c, g or t
  modified_base (4556943)..(4556944): a, c, g or t
  modified_base (4557115)..(4557116): a, c, g or t
  modified_base (4557201)..(4557201): a, c, g or t
  modified_base (4557233)..(4557256): a, c, g or t
  modified_base (4557358)..(4557358): a, c, g or t
  modified_base (4558200)..(4558203): a, c, g or t
  modified_base (4558223)..(4558223): a, c, g or t
  modified_base (4559301)..(4559301): a, c, g or t
  modified_base (4559394)..(4559399): a, c, g or t
  modified_base (4559401)..(4559401): a, c, g or t
  modified_base (4559403)..(4559404): a, c, g or t
  modified_base (4559406)..(4559407): a, c, g or t
  modified_base (4559432)..(4559433): a, c, g or t
  modified_base (4559583)..(4559592): a, c, g or t
  modified_base (4559706)..(4559709): a, c, g or t
  modified_base (4559716)..(4559717): a, c, g or t
  modified_base (4559742)..(4559742): a, c, g or t
  modified_base (4559802)..(4559802): a, c, g or t
  modified_base (4561687)..(4561687): a, c, g or t
  modified_base (4568848)..(4568848): a, c, g or t
  modified_base (4568936)..(4568936): a, c, g or t
  modified_base (4569474)..(4569474): a, c, g or t
  modified_base (4571100)..(4571100): a, c, g or t
  modified_base (4571204)..(4571207): a, c, g or t
  modified_base (4571210)..(4571210): a, c, g or t
  modified_base (4571730)..(4571730): a, c, g or t
  modified_base (4573383)..(4573386): a, c, g or t
  modified_base (4574101)..(4574101): a, c, g or t
  modified_base (4574287)..(4574287): a, c, g or t
  modified_base (4574457)..(4574457): a, c, g or t
  modified_base (4581485)..(4581485): a, c, g or t
  modified_base (4583353)..(4583353): a, c, g or t
  modified_base (4586235)..(4586235): a, c, g or t
  modified_base (4588123)..(4588123): a, c, g or t
  modified_base (4588390)..(4588390): a, c, g or t
  modified_base (4594950)..(4594950): a, c, g or t
  modified_base (4597813)..(4597813): a, c, g or t
  modified_base (4598154)..(4598154): a, c, g or t
  modified_base (4598219)..(4598219): a, c, g or t
  modified_base (4599388)..(4599393): a, c, g or t
  modified_base (4600518)..(4600518): a, c, g or t
  modified_base (4602868)..(4602869): a, c, g or t
  modified_base (4603707)..(4603707): a, c, g or t
  modified_base (4603745)..(4603745): a, c, g or t
  modified_base (4604137)..(4604141): a, c, g or t
  modified_base (4604767)..(4604767): a, c, g or t
  modified_base (4605228)..(4605243): a, c, g or t
  modified_base (4605248)..(4605248): a, c, g or t
  modified_base (4605351)..(4605351): a, c, g or t
  modified_base (4605462)..(4605462): a, c, g or t
  modified_base (4605629)..(4605629): a, c, g or t
  modified_base (4605637)..(4605661): a, c, g or t
  modified_base (4605860)..(4605860): a, c, g or t
  modified_base (4606676)..(4606676): a, c, g or t
  modified_base (4606739)..(4606739): a, c, g or t
  modified_base (4607002)..(4607011): a, c, g or t
  modified_base (4607131)..(4607131): a, c, g or t
  modified_base (4618531)..(4618531): a, c, g or t
  modified_base (4620266)..(4620266): a, c, g or t
  modified_base (4621596)..(4621596): a, c, g or t
  modified_base (4623219)..(4623219): a, c, g or t
  modified_base (4626818)..(4626818): a, c, g or t
  modified_base (4628031)..(4628031): a, c, g or t
  modified_base (4628270)..(4628278): a, c, g or t
  modified_base (4628760)..(4628760): a, c, g or t
  modified_base (4630259)..(4630259): a, c, g or t
  modified_base (4630262)..(4630262): a, c, g or t
  modified_base (4630290)..(4630290): a, c, g or t
  modified_base (4630335)..(4630335): a, c, g or t
  modified_base (4630352)..(4630352): a, c, g or t
  modified_base (4630363)..(4630363): a, c, g or t
  modified_base (4630387)..(4630387): a, c, g or t
  modified_base (4630454)..(4630454): a, c, g or t
  modified_base (4630471)..(4630471): a, c, g or t
  modified_base (4631267)..(4631267): a, c, g or t
  modified_base (4631792)..(4631795): a, c, g or t
  modified_base (4632635)..(4632641): a, c, g or t
  modified_base (4632841)..(4632841): a, c, g or t
  modified_base (4633122)..(4633122): a, c, g or t
  modified_base (4634836)..(4634836): a, c, g or t
  modified_base (4635592)..(4635592): a, c, g or t
  modified_base (4636546)..(4636546): a, c, g or t
  modified_base (4636930)..(4636930): a, c, g or t
  modified_base (4636974)..(4636977): a, c, g or t
  modified_base (4638811)..(4638811): a, c, g or t
  modified_base (4638813)..(4638817): a, c, g or t
  modified_base (4639146)..(4639146): a, c, g or t
  modified_base (4639148)..(4639148): a, c, g or t
  modified_base (4640127)..(4640127): a, c, g or t
  modified_base (4640811)..(4640811): a, c, g or t
  modified_base (4641710)..(4641710): a, c, g or t
  modified_base (4642331)..(4642331): a, c, g or t
  modified_base (4642888)..(4642888): a, c, g or t
  modified_base (4643741)..(4643747): a, c, g or t
  modified_base (4644068)..(4644068): a, c, g or t
  modified_base (4644475)..(4644475): a, c, g or t
  modified_base (4644483)..(4644484): a, c, g or t
  modified_base (4644490)..(4644494): a, c, g or t
  modified_base (4644615)..(4644615): a, c, g or t
  modified_base (4644632)..(4644635): a, c, g or t
  modified_base (4644885)..(4644885): a, c, g or t
  modified_base (4644949)..(4644951): a, c, g or t
  modified_base (4644954)..(4644957): a, c, g or t
  modified_base (4645067)..(4645067): a, c, g or t
  modified_base (4645154)..(4645154): a, c, g or t
  modified_base (4645223)..(4645223): a, c, g or t
  modified_base (4645231)..(4645231): a, c, g or t
  modified_base (4645239)..(4645240): a, c, g or t
  modified_base (4645259)..(4645259): a, c, g or t
  modified_base (4645357)..(4645358): a, c, g or t
  modified_base (4645643)..(4645643): a, c, g or t
  modified_base (4645774)..(4645774): a, c, g or t
  modified_base (4645778)..(4645778): a, c, g or t
  modified_base (4645860)..(4645860): a, c, g or t
  modified_base (4646048)..(4646048): a, c, g or t
  modified_base (4646237)..(4646238): a, c, g or t
  modified_base (4646241)..(4646242): a, c, g or t
  modified_base (4646244)..(4646245): a, c, g or t
  modified_base (4646249)..(4646250): a, c, g or t
  modified_base (4646258)..(4646268): a, c, g or t
  modified_base (4646362)..(4646372): a, c, g or t
  modified_base (4646473)..(4646473): a, c, g or t
  modified_base (4646527)..(4646528): a, c, g or t
  modified_base (4646715)..(4646716): a, c, g or t
  modified_base (4646726)..(4646729): a, c, g or t
  modified_base (4646731)..(4646733): a, c, g or t
  modified_base (4646736)..(4646737): a, c, g or t
  modified_base (4646739)..(4646740): a, c, g or t
  modified_base (4646763)..(4646763): a, c, g or t
  modified_base (4646773)..(4646773): a, c, g or t
  modified_base (4647115)..(4647115): a, c, g or t
  modified_base (4647256)..(4647259): a, c, g or t
  modified_base (4647336)..(4647336): a, c, g or t
  modified_base (4647339)..(4647346): a, c, g or t
  modified_base (4647349)..(4647349): a, c, g or t
  modified_base (4647982)..(4647982): a, c, g or t
  modified_base (4648148)..(4648148): a, c, g or t
  modified_base (4648243)..(4648243): a, c, g or t
  modified_base (4648275)..(4648275): a, c, g or t
  modified_base (4648297)..(4648297): a, c, g or t
  modified_base (4651015)..(4651015): a, c, g or t
  modified_base (4653034)..(4653034): a, c, g or t
  modified_base (4656893)..(4656893): a, c, g or t
  modified_base (4656899)..(4656899): a, c, g or t
  modified_base (4657711)..(4657711): a, c, g or t
  modified_base (4657713)..(4657713): a, c, g or t
  modified_base (4658388)..(4658392): a, c, g or t
  modified_base (4659301)..(4659301): a, c, g or t
  modified_base (4659813)..(4659813): a, c, g or t
  modified_base (4662261)..(4662270): a, c, g or t
  modified_base (4663527)..(4663533): a, c, g or t
  modified_base (4664404)..(4664411): a, c, g or t
  modified_base (4664421)..(4664421): a, c, g or t
  modified_base (4669178)..(4669178): a, c, g or t
  modified_base (4670193)..(4670196): a, c, g or t
  modified_base (4670344)..(4670344): a, c, g or t
  modified_base (4671254)..(4671254): a, c, g or t
  modified_base (4671824)..(4671826): a, c, g or t
  modified_base (4673089)..(4673089): a, c, g or t
  modified_base (4675090)..(4675090): a, c, g or t
  modified_base (4677206)..(4677206): a, c, g or t
  modified_base (4678188)..(4678188): a, c, g or t
  modified_base (4679677)..(4679677): a, c, g or t
  modified_base (4679996)..(4679996): a, c, g or t
  modified_base (4680252)..(4680252): a, c, g or t
  modified_base (4681440)..(4681440): a, c, g or t
  modified_base (4681510)..(4681510): a, c, g or t
  modified_base (4685923)..(4685923): a, c, g or t
  modified_base (4686494)..(4686494): a, c, g or t
  modified_base (4687469)..(4687469): a, c, g or t
  modified_base (4691197)..(4691200): a, c, g or t
  modified_base (4691767)..(4691767): a, c, g or t
  modified_base (4691973)..(4691973): a, c, g or t
  modified_base (4692301)..(4692305): a, c, g or t
  modified_base (4692542)..(4692553): a, c, g or t
  modified_base (4693608)..(4693614): a, c, g or t
  modified_base (4695026)..(4695026): a, c, g or t
  modified_base (4695238)..(4695238): a, c, g or t
  modified_base (4696932)..(4696932): a, c, g or t
  modified_base (4696949)..(4696949): a, c, g or t
  modified_base (4699645)..(4699645): a, c, g or t
  modified_base (4701250)..(4701250): a, c, g or t
  modified_base (4701645)..(4701645): a, c, g or t
  modified_base (4702918)..(4702918): a, c, g or t
  modified_base (4702930)..(4702933): a, c, g or t
  modified_base (4702937)..(4702938): a, c, g or t
  modified_base (4704254)..(4704254): a, c, g or t
  modified_base (4704830)..(4704830): a, c, g or t
  modified_base (4704944)..(4704944): a, c, g or t
  modified_base (4705360)..(4705363): a, c, g or t
  modified_base (4706472)..(4706472): a, c, g or t
  modified_base (4706860)..(4706860): a, c, g or t
  modified_base (4709924)..(4709924): a, c, g or t
  modified_base (4710191)..(4710195): a, c, g or t
  modified_base (4712026)..(4712026): a, c, g or t
  modified_base (4714400)..(4714400): a, c, g or t
  modified_base (4715141)..(4715144): a, c, g or t
  modified_base (4715349)..(4715349): a, c, g or t
  modified_base (4716112)..(4716112): a, c, g or t
  modified_base (4716835)..(4716835): a, c, g or t
  modified_base (4716944)..(4716956): a, c, g or t
  modified_base (4716958)..(4716958): a, c, g or t
  modified_base (4718015)..(4718015): a, c, g or t
  modified_base (4718292)..(4718294): a, c, g or t
  modified_base (4721666)..(4721666): a, c, g or t
  modified_base (4726503)..(4726503): a, c, g or t
  modified_base (4726525)..(4726525): a, c, g or t
  modified_base (4727190)..(4727190): a, c, g or t
  modified_base (4727625)..(4727628): a, c, g or t
  modified_base (4729704)..(4729704): a, c, g or t
  modified_base (4729894)..(4729894): a, c, g or t
  modified_base (4730404)..(4730404): a, c, g or t
  modified_base (4730790)..(4730790): a, c, g or t
  modified_base (4732839)..(4732839): a, c, g or t
  modified_base (4734617)..(4734617): a, c, g or t
  modified_base (4736408)..(4736408): a, c, g or t
  modified_base (4736893)..(4736894): a, c, g or t
  modified_base (4738377)..(4738377): a, c, g or t
  modified_base (4739858)..(4739859): a, c, g or t
  modified_base (4739862)..(4739862): a, c, g or t
  modified_base (4740175)..(4740190): a, c, g or t
  modified_base (4741711)..(4741712): a, c, g or t
  modified_base (4741715)..(4741717): a, c, g or t
  modified_base (4742996)..(4742996): a, c, g or t
  modified_base (4745736)..(4745736): a, c, g or t
  modified_base (4746833)..(4746833): a, c, g or t
  modified_base (4748007)..(4748007): a, c, g or t
  modified_base (4748092)..(4748092): a, c, g or t
  modified_base (4748104)..(4748104): a, c, g or t
  modified_base (4749654)..(4749657): a, c, g or t
  modified_base (4750216)..(4750216): a, c, g or t
  modified_base (4751378)..(4751381): a, c, g or t
  modified_base (4751483)..(4751487): a, c, g or t
  modified_base (4752733)..(4752733): a, c, g or t
  modified_base (4752908)..(4752908): a, c, g or t
  modified_base (4753551)..(4753554): a, c, g or t
  modified_base (4753831)..(4753831): a, c, g or t
  modified_base (4754330)..(4754330): a, c, g or t
  modified_base (4754542)..(4754543): a, c, g or t
  modified_base (4754821)..(4754821): a, c, g or t
  modified_base (4754995)..(4754995): a, c, g or t
  modified_base (4755290)..(4755293): a, c, g or t
  modified_base (4755845)..(4755848): a, c, g or t
  modified_base (4756004)..(4756007): a, c, g or t
  modified_base (4757654)..(4757654): a, c, g or t
  modified_base (4757656)..(4757656): a, c, g or t
  modified_base (4757676)..(4757676): a, c, g or t
  modified_base (4757680)..(4757680): a, c, g or t
  modified_base (4758871)..(4758874): a, c, g or t
  modified_base (4759066)..(4759066): a, c, g or t
  modified_base (4759254)..(4759255): a, c, g or t
  modified_base (4759755)..(4759759): a, c, g or t
  modified_base (4759908)..(4759909): a, c, g or t
  modified_base (4761954)..(4761961): a, c, g or t
  modified_base (4761963)..(4761964): a, c, g or t
  modified_base (4761968)..(4761969): a, c, g or t
  modified_base (4762341)..(4762341): a, c, g or t
  modified_base (4762838)..(4762838): a, c, g or t
  modified_base (4769207)..(4769208): a, c, g or t
  modified_base (4769218)..(4769251): a, c, g or t
  modified_base (4769255)..(4769256): a, c, g or t
  modified_base (4769270)..(4769271): a, c, g or t
  modified_base (4769280)..(4769290): a, c, g or t
  modified_base (4769294)..(4769295): a, c, g or t
  modified_base (4769297)..(4769300): a, c, g or t
  modified_base (4774614)..(4774614): a, c, g or t
  modified_base (4781007)..(4781016): a, c, g or t
  modified_base (4781113)..(4781113): a, c, g or t
  modified_base (4781117)..(4781117): a, c, g or t
  modified_base (4782781)..(4782781): a, c, g or t
  modified_base (4783224)..(4783224): a, c, g or t
  modified_base (4783571)..(4783575): a, c, g or t
  modified_base (4783760)..(4783760): a, c, g or t
  modified_base (4785295)..(4785295): a, c, g or t
  modified_base (4786260)..(4786260): a, c, g or t
  modified_base (4786512)..(4786512): a, c, g or t
  modified_base (4789280)..(4789280): a, c, g or t
  modified_base (4789840)..(4789840): a, c, g or t
  modified_base (4795881)..(4795884): a, c, g or t
  modified_base (4797539)..(4797539): a, c, g or t
  modified_base (4801406)..(4801406): a, c, g or t
  modified_base (4802288)..(4802288): a, c, g or t
  modified_base (4803240)..(4803259): a, c, g or t
  modified_base (4809295)..(4809295): a, c, g or t
  modified_base (4809566)..(4809566): a, c, g or t
  modified_base (4810662)..(4810662): a, c, g or t
  modified_base (4811126)..(4811126): a, c, g or t
  modified_base (4814450)..(4814450): a, c, g or t
  modified_base (4815583)..(4815583): a, c, g or t
  modified_base (4815680)..(4815680): a, c, g or t
  modified_base (4816208)..(4816208): a, c, g or t
  modified_base (4816350)..(4816350): a, c, g or t
  modified_base (4816853)..(4816860): a, c, g or t
  modified_base (4816862)..(4816863): a, c, g or t
  modified_base (4817509)..(4817509): a, c, g or t
  modified_base (4817578)..(4817578): a, c, g or t
  modified_base (4818391)..(4818391): a, c, g or t
  modified_base (4820264)..(4820264): a, c, g or t
  modified_base (4821794)..(4821794): a, c, g or t
  modified_base (4821959)..(4821959): a, c, g or t
  modified_base (4829179)..(4829179): a, c, g or t
  modified_base (4831182)..(4831185): a, c, g or t
  modified_base (4834111)..(4834111): a, c, g or t
  modified_base (4834127)..(4834129): a, c, g or t
  modified_base (4834277)..(4834277): a, c, g or t
  modified_base (4834343)..(4834365): a, c, g or t
  modified_base (4834379)..(4834380): a, c, g or t
  modified_base (4834384)..(4834401): a, c, g or t
  modified_base (4834458)..(4834459): a, c, g or t
  modified_base (4834482)..(4834483): a, c, g or t
  modified_base (4836403)..(4836403): a, c, g or t
  modified_base (4837372)..(4837373): a, c, g or t
  modified_base (4839202)..(4839202): a, c, g or t
  modified_base (4839936)..(4839936): a, c, g or t
  modified_base (4841162)..(4841165): a, c, g or t
  modified_base (4846438)..(4846438): a, c, g or t
  modified_base (4846569)..(4846569): a, c, g or t
  modified_base (4847843)..(4847843): a, c, g or t
  modified_base (4848221)..(4848221): a, c, g or t
  modified_base (4849385)..(4849389): a, c, g or t
  modified_base (4849922)..(4849922): a, c, g or t
  modified_base (4850412)..(4850412): a, c, g or t
  modified_base (4850715)..(4850715): a, c, g or t
  modified_base (4851226)..(4851226): a, c, g or t
  modified_base (4851326)..(4851326): a, c, g or t
  modified_base (4851907)..(4851908): a, c, g or t
  modified_base (4852206)..(4852207): a, c, g or t
  modified_base (4853174)..(4853174): a, c, g or t
  modified_base (4854395)..(4854395): a, c, g or t
  modified_base (4854397)..(4854403): a, c, g or t
  modified_base (4854794)..(4854794): a, c, g or t
  modified_base (4855537)..(4855537): a, c, g or t
  modified_base (4856489)..(4856493): a, c, g or t
  modified_base (4857233)..(4857239): a, c, g or t
  modified_base (4859517)..(4859517): a, c, g or t
  modified_base (4861585)..(4861585): a, c, g or t
  modified_base (4862502)..(4862502): a, c, g or t
  modified_base (4863195)..(4863196): a, c, g or t
  modified_base (4866323)..(4866323): a, c, g or t
  modified_base (4869325)..(4869331): a, c, g or t
  modified_base (4873121)..(4873121): a, c, g or t
  modified_base (4876971)..(4876971): a, c, g or t
  modified_base (4877861)..(4877861): a, c, g or t
  modified_base (4882229)..(4882229): a, c, g or t
  modified_base (4882642)..(4882642): a, c, g or t
  modified_base (4883418)..(4883419): a, c, g or t
  modified_base (4883426)..(4883427): a, c, g or t
  modified_base (4883617)..(4883617): a, c, g or t
  modified_base (4883620)..(4883620): a, c, g or t
  modified_base (4886094)..(4886094): a, c, g or t
  modified_base (4888352)..(4888352): a, c, g or t
  modified_base (4888354)..(4888354): a, c, g or t
  modified_base (4888573)..(4888573): a, c, g or t
  modified_base (4889474)..(4889476): a, c, g or t
  modified_base (4896925)..(4896925): a, c, g or t
  modified_base (4903073)..(4903073): a, c, g or t
  modified_base (4906721)..(4906721): a, c, g or t
  modified_base (4906736)..(4906736): a, c, g or t
  modified_base (4906757)..(4906757): a, c, g or t
  modified_base (4907189)..(4907189): a, c, g or t
  modified_base (4908415)..(4908421): a, c, g or t
  modified_base (4908590)..(4908590): a, c, g or t
  modified_base (4910844)..(4910844): a, c, g or t
  modified_base (4912269)..(4912281): a, c, g or t
  modified_base (4912316)..(4912316): a, c, g or t
  modified_base (4912957)..(4912957): a, c, g or t
  modified_base (4914525)..(4914525): a, c, g or t
  modified_base (4915920)..(4915920): a, c, g or t
  modified_base (4918164)..(4918164): a, c, g or t
  modified_base (4918193)..(4918193): a, c, g or t
  modified_base (4919475)..(4919475): a, c, g or t
  modified_base (4919709)..(4919709): a, c, g or t
  modified_base (4919711)..(4919714): a, c, g or t
  modified_base (4919718)..(4919738): a, c, g or t
  modified_base (4919742)..(4919743): a, c, g or t
  modified_base (4919765)..(4919766): a, c, g or t
  modified_base (4919770)..(4919771): a, c, g or t
  modified_base (4920740)..(4920740): a, c, g or t
  modified_base (4922747)..(4922747): a, c, g or t
  modified_base (4922890)..(4922890): a, c, g or t
  modified_base (4929724)..(4929724): a, c, g or t
  modified_base (4931331)..(4931331): a, c, g or t
  modified_base (4933181)..(4933181): a, c, g or t
  modified_base (4934740)..(4934741): a, c, g or t
  modified_base (4935387)..(4935387): a, c, g or t
  modified_base (4936631)..(4936639): a, c, g or t
  modified_base (4936671)..(4936673): a, c, g or t
  modified_base (4936675)..(4936675): a, c, g or t
  modified_base (4937008)..(4937008): a, c, g or t
  modified_base (4937066)..(4937066): a, c, g or t
  modified_base (4937691)..(4937691): a, c, g or t
  modified_base (4940942)..(4940942): a, c, g or t
  modified_base (4944373)..(4944379): a, c, g or t
  modified_base (4951563)..(4951564): a, c, g or t
  modified_base (4953804)..(4953804): a, c, g or t
  modified_base (4954702)..(4954702): a, c, g or t
  modified_base (4966953)..(4966953): a, c, g or t
  modified_base (4967260)..(4967260): a, c, g or t
  modified_base (4967440)..(4967440): a, c, g or t
  modified_base (4967542)..(4967542): a, c, g or t
  modified_base (4967621)..(4967621): a, c, g or t
  modified_base (4967849)..(4967849): a, c, g or t
  modified_base (4968478)..(4968481): a, c, g or t
  modified_base (4969535)..(4969535): a, c, g or t
  modified_base (4973136)..(4973136): a, c, g or t
  modified_base (4973607)..(4973607): a, c, g or t
  modified_base (4973614)..(4973615): a, c, g or t
  modified_base (4974514)..(4974514): a, c, g or t
  modified_base (4974537)..(4974537): a, c, g or t
  modified_base (4974570)..(4974570): a, c, g or t
  modified_base (4974586)..(4974586): a, c, g or t
  modified_base (4975554)..(4975606): a, c, g or t
  modified_base (4976482)..(4976482): a, c, g or t
  modified_base (4976644)..(4976647): a, c, g or t
  modified_base (4976653)..(4976654): a, c, g or t
  modified_base (4979874)..(4979874): a, c, g or t
  modified_base (4985639)..(4985639): a, c, g or t
  modified_base (4987280)..(4987280): a, c, g or t
  modified_base (4987385)..(4987385): a, c, g or t
  modified_base (4987396)..(4987396): a, c, g or t
  modified_base (4988127)..(4988132): a, c, g or t
  modified_base (4989566)..(4989567): a, c, g or t
  modified_base (4991569)..(4991569): a, c, g or t
  modified_base (4993896)..(4993896): a, c, g or t
  modified_base (4993898)..(4993899): a, c, g or t
  modified_base (4995272)..(4995272): a, c, g or t
  modified_base (4996029)..(4996029): a, c, g or t
  modified_base (4999074)..(4999074): a, c, g or t
  modified_base (5002571)..(5002572): a, c, g or t
  modified_base (5002845)..(5002845): a, c, g or t
  modified_base (5004849)..(5004849): a, c, g or t
  modified_base (5005001)..(5005001): a, c, g or t
  modified_base (5005448)..(5005449): a, c, g or t
  modified_base (5005753)..(5005753): a, c, g or t
  modified_base (5006149)..(5006153): a, c, g or t
  modified_base (5007387)..(5007387): a, c, g or t
  modified_base (5009336)..(5009336): a, c, g or t
  modified_base (5010081)..(5010081): a, c, g or t
  modified_base (5010759)..(5010760): a, c, g or t
  modified_base (5010762)..(5010775): a, c, g or t
  modified_base (5011377)..(5011377): a, c, g or t
  modified_base (5022286)..(5022287): a, c, g or t
  modified_base (5022289)..(5022292): a, c, g or t
  modified_base (5026645)..(5026645): a, c, g or t
  modified_base (5028789)..(5028789): a, c, g or t
  modified_base (5029183)..(5029183): a, c, g or t
  modified_base (5031014)..(5031014): a, c, g or t
  modified_base (5031763)..(5031763): a, c, g or t
  modified_base (5033384)..(5033384): a, c, g or t
  modified_base (5033390)..(5033390): a, c, g or t
  modified_base (5042026)..(5042029): a, c, g or t
  modified_base (5042314)..(5042315): a, c, g or t
  modified_base (5047795)..(5047798): a, c, g or t
  modified_base (5047928)..(5047933): a, c, g or t
  modified_base (5050187)..(5050187): a, c, g or t
  modified_base (5050190)..(5050191): a, c, g or t
  modified_base (5050221)..(5050221): a, c, g or t
  modified_base (5050224)..(5050224): a, c, g or t
  modified_base (5050288)..(5050288): a, c, g or t
  modified_base (5051195)..(5051195): a, c, g or t
  modified_base (5051586)..(5051592): a, c, g or t
  modified_base (5051601)..(5051601): a, c, g or t
  modified_base (5051915)..(5051915): a, c, g or t
  modified_base (5053615)..(5053617): a, c, g or t
  modified_base (5053807)..(5053807): a, c, g or t
  modified_base (5057347)..(5057347): a, c, g or t
  modified_base (5057940)..(5057946): a, c, g or t
  modified_base (5058034)..(5058034): a, c, g or t
  modified_base (5060175)..(5060175): a, c, g or t
  modified_base (5060281)..(5060281): a, c, g or t
  modified_base (5060562)..(5060562): a, c, g or t
  modified_base (5060675)..(5060675): a, c, g or t
  modified_base (5063785)..(5063787): a, c, g or t
  modified_base (5068547)..(5068547): a, c, g or t
  modified_base (5068600)..(5068600): a, c, g or t
  modified_base (5068606)..(5068606): a, c, g or t
  modified_base (5068613)..(5068617): a, c, g or t
  modified_base (5071057)..(5071060): a, c, g or t
  modified_base (5071934)..(5071934): a, c, g or t
  modified_base (5072001)..(5072001): a, c, g or t
  modified_base (5072903)..(5072903): a, c, g or t
  modified_base (5073101)..(5073101): a, c, g or t
  modified_base (5074263)..(5074271): a, c, g or t
  modified_base (5075370)..(5075371): a, c, g or t
  modified_base (5075373)..(5075376): a, c, g or t
  modified_base (5075388)..(5075389): a, c, g or t
  modified_base (5075434)..(5075445): a, c, g or t
  modified_base (5075575)..(5075578): a, c, g or t
  modified_base (5075584)..(5075584): a, c, g or t
  modified_base (5075822)..(5075825): a, c, g or t
  modified_base (5075889)..(5075890): a, c, g or t
  modified_base (5076338)..(5076338): a, c, g or t
  modified_base (5076354)..(5076356): a, c, g or t
agcttttcattctgactgcaacgggcaatatgtctctgtgtggattaaaaaaagagtctctgacagctgcttctgaactggttacctgccgtgagtaaattaaaattttattgacttaggtcactaaatactttaaccaatataggcatagcgcacagacagataaaaattacagagtacacaacatccatgaaacgcattagcaccaccattaccaccaccatnaccaccaccatcaccattaccattaccacaggtaacggtgcgggctgacgcgtacaggaaacacagaaaaaagcccgcacctgacagtgcgggcttttttttcgaccaaaggtaacgaggtaacaaccatgcgagtgttgaagttcggcggtacatcagtggcaaatgcagaacgttttctgcgggttgccgatattctggaaagcaatgccaggcaggggcaggtggccaccgtcctctctgcccccgccaaaatcaccaaccacctggtggcgatgattgaaaaaaccattagcggccaggatgctttacccaatatcagcgatgccgaacgtatttttgccgaacttctgacgggactcgccgccgcccagccgggattcccgctggcgcaattgaaaactttcgtcgaccaggaatttgcccaaataaaacatgtcctgcatggcattagtttgttagggcagtgcccggatagcattaacgctgcgctgatttgccgtggcgagaaaatgtcgatcgccattatggccggcgtattagaagcgcgcggtcacaacgttaccgttatcgatccggtcgaaaaactgctggcagtggggcattacctcgaatctactgtcgatattgcagagtccacccgccgtattgcggcaagtcgtattccggctgatcacatggtgctgatggcaggtttcaccgccggtaatgaaaaaggcgaactggtggtacttggacgcaacggttccgactactccgcggcggtgctggctgcctgtttacgcgccgattgttgcgagatttggacggacgttgacggggtatatacctgcgacccgcgtcaggtgcccgatgcgaggttgttgaaatcgatgtcctaccaggnngcgatggagctttcctacttcggcgctaaagttcttcacccccgcaccattacccccatcgcccagttccagatcccttgcctgattaaaaataccggaaatcctcaagctccaggtacgctcattggtgccagtcgtgatgaagacgaattaccggtcaagggcatttccaatctgaataatatggcaatgttcagcgtttccggcccggggatgaaaggaatggtcggcatggcggcgcgcgtctttgctgcaatgtcacgcgcccgtatttccgtggtgctgattacgcaatcatcttccgaatacagtatcagtttctgcgttccgcaaagcgactgtgtgcgagctgaacgggcaatgcaggaagagttctacctggaactgaaagaaggcttactggagccgctggcggtgacggaacggctggccattatctcggtggtaggtgatggtatgcgcaccttgcgtgggatctcggcgaaattctttgcnnnnnnnnnnnnnnnnaatatcaacattgtcgctattgctcagggatcttctgaacgctcaatctctgtcgtggtaaataacgatgatgcgaccactggcgtgcgcgttactcatcagatgctgttcaataccgatcaggttatcgaagtgtttgtgattggcgtcggtggcgttggcggtgcactgctggtgcaactgaagcgtcagcaaagctggttgaagaataaacatatcgacttacgtgtctgcggtgttgctaactcgaaggctctgctcaccaatgtgcatggcctaaatctggaaaactggcaggaagaactggcgcaagccaaagagccgtttaatctcgggcgcttaattcgcctcgtgaaagaatatcatctgctgaacccggtcattgttgactgcacctccagccaggcagtggcggatcaatatgccgacttcctgcgcgaaggtttccacgttgtcacgccgaacaaaaaggccaacacctcgtcgatggattactaccatctgttgcgtcatgcggctgaaaaatcgcggcgtaaattcctctatgacaccaacgttggggctggattaccggttattgagaacctgcaaaatctgctcaatgctggtgatgaattgatgaagttctccggcattctttcaggttcgctttcttatatcttcggcaagttagacgaaggcatgagtttctccgaggcgactacgctggcgcgggaaatgggttataccgaaccggatccgcgagatgatctttctggtatggatgtagcgcgtaaactattaattctcgctcgtgaaacgggacgtgaactggagctggcggatattgaaattgaacctgtgctgcccgcagagtttaacgctgagggtgatgttgccgcttttatggcgaatctgtcacagctcgacgatctctttgccgcgcgcgtggcgaaggcccgtgatgaaggaaaagttttgcgctatgttggcaatattgatgaagatggcgtctgccgcgtgaagattgccgaagtggatggtaatgatccgctgttcaaagtgaaaaatggcgaaaacgccctggccttttatagccactattatcagccgctgccgttggtgctgcgcggatatggtgcgggcaatgacgttaccgctgccggtgtctttgccgatctgctacgtaccctctcatggaagttaggagtctgacatggttaaagtttatgccccggcttccagtgccaatatgagcgtcgggtttgatgtgctcggggcggcggtgacacccgttgatggtgcattgctcggagatgtagtcacggttgagtcggcagagacattcagtctcaacaacctcggacgctttgccgataagctgccgtcagaaccacgggaaaatatcgtttatcagtgctgggagcgtttttgccaggagctgggcaagcaaattccagtggcgatgactctggaaaagaatatgccgatcggttcgggcttaggctccagcgcctgttcggtggtcgcggcgctgatggcgatgaatgaacactgcggcaagccgcttaatgacccccgtttgctggctttgatgggcgagctggaaggacgaatctccggcagcattcattacgacaacgtggcaccgtgttttcttggtggtatgcagttgatgatcgaagaaaacgacatcatcagccagcaagtgccagggtttgatgagtggctgtgggtgctggcgtatccggggattaaagtctcgacggcagaagcccgggctattttaccggcgcagtatcgccgccaggattgcattgcgcacgggcgacacttggcaggcttcattcacgcctgctattcccgtcagcctgagcttgccgcgaagctgatgaaagatgttatcgcagaaccctaccgtgaacggttactgcctggcttccggcaggcgcggcaggcggtcgcggaaatcggcgcggtagcgagcggtatctccggctccggcccgaccttgtttgctctgtgtgacaagccggataccgcccagcgcgttgccgactggttgggtaagaactacctgcaaaatcaggaaggttttgttcatatttgccggctggatacggcgggcgcacgagtactggaaaactaaatgaaactctacaatcttaaagatcacaatgagcaggtcagctttgcgcaagccgtaacccaggggttgggcaaaaatcaggggctgttttttccgcacgacctgccggaattcagcctgactgaaattgatgagatgctgaagctggattttgtcacccgcagtgcgaagatcctctcggcgtttattggtgatgaaatcccgcaggaaatcctggaagagcgcgtgcgcgcggcgtttgccttcccggctccggtcgccaatgttgaaagcgatgtcggttgtctggaattgttccacgggccaacgctggcatttaaagatttcggcggtcgctttatggcacaaatgctgacccatattgcgggcgataagccagtgaccattctgaccgcgacctccggtgataccggagcggcagtggctcatgctttctacggtttaccgaatgtgaaagtggttatcctttatccacgaggcaaaatcagtccactgcaagaaaaactgttctgtacattgggcggcaatatcgaaactgttgccatcgacggcgatttcgatgcctgtcaggcgctggtgaagcaggcgtttgatgatgaagagctgaaagtggcgctggggttaaactcagctaactcgattaacattagccggttgctggcgcagatttgctactactttgaagcagttgcgcagctgccgcaggnnnngcgcaaccagctggttgtctcggtgccaagcggaaacttcggcgatttgacggcgggtctgctggcgaagtcactcggtctgccggtgaaacgttttattgctgcgaccaacgtgaacgataccgtgccacgtttcctgcatgacggtcagtggtcacccaaagcgactcaggcgacgttatccaacgcgatggacgtgagtcagccgaacaactggccgcgtgtggaagagttgttccgccgcaaaatctggcaactgaaagagctgggttatgccgccgtggatgatgaaaccacgcaacagacaatgcgtgagttaaaagaactgggctacacttcggagccgcacgctgccgtagcgtatcgtgcgctgcgtgaccagttgaatccaggcgaatatggcttgttcctcggcaccgcgcatccggcgaaatttaaagagagcgtggaagcgattctcggtgaaacgttggatctgccaaaagagctggcagaacgtgccgatttacccttgctttcgcataatctgcccgccgattttgctgcgttgcgtaaattgatgatgaatcatcagtaacatctattcattatctcaatcaggccgggtttgcttttatgcagcccggcttttttgtgaagaaaatatggagagaaacgacagggaaaaaggagaaattctcaataaatgcggtaacttagagattaggattgcggagaataacaaccgccgctctcatcgcgtaatctccggatatcgacccataacgggcaatgataaaaggagtaacctgtgaaaaagatgcaatctatcgtactcgcactttccctggttctggtcgctcccatggcaacgcaggctgcggaaattacgttagtcccgtcagtaaaattacagataggcgatcgtgataatcgcggttattactgggatggcggtcactggcgcgaccacggctggtggaaacaacattatgaatggcgaggcaatcgctggcacccacacggaccgccgccaccgccgcgtcaccataagaaagctcatcatgatcatcacggcggtcatggtccaggcaaacatcaccgctaaatgacaaatgccgggtaacaatccggcattcagcgcctgatgcgacgctggcgcgtcttatcaggcctacgtgaattctgcaatatattgaatctgcatgcttttgtaggccggataaggcgttcacgccgcatccggcattgactacaaacttaacgctgctcgtagcgtttaaacaccagttcgccattgctggaggaagcttcatcaaagaagtaaccttcgctattaaaaccagtcagttgctctggtttggtcagccgattttcaataatgaaacgactcatcagaccgcgtgctttcttagcgtagaagctgattatcttaaatttgccgttcttctcatcgaggaacaccggcttgataatctcggcattcaatttcttcggcttcaccgatttaaaatactcatctgacgccagattaatcaccacattatcgccttgtgctgcgagcgcctcgttcagcttgttggtgatgatatctccccagaattgatacagatctttccctcgggcattctcaagacggatccccatttccagacgataaggctgcattaaatcgagcgggcggagtacgccatacaagccggaaagcattcgcaaatgctgttgggcaaaatcgaaatcgtcttcgctgaaggtttcggcctgcaagccggtgtagacatcacctttaaacgccagaatcgcctggcgggcattctccggcgtgaaatctggctgccagtcatgaaagcgagcggcgttgatacctgccagtttgtcgctgatacgcatcagcgtgctaatctgcggaggcgtcagtttccgcgcttcatggatcaactgctgggaattgtctaacagctccggcagtgtatatcgcgtggtggtcaacgggctttggtaatcaagcgttttcgcaggtgaaataagaatcagcatatccagtccttgcaggaaatttatgccgactttagcaaaaaaagagaatgagttgatcgatagttgtgattactcctgcgaaacatcatcccacgcgtcccgagaaagctggcgaccgatatccggataacgcaacggatcaaacaccgggcgcacnccgagtttacgctggcgtagataatcactggcaatggtatgaaccacaggcgagagcagtaatatggcagtcaaattggtaatagccatgcaggccattatgatatctgccagttgccacatcagcggaagacttagcaaggtgccgccgatgaccgttgcgaaggtgcagatccgcaaacaccagatcgctttagggttgttcaggcgtaaaaagaagagattgttttcggcataaatgtagttggcaacgatggagctgaaggcaaacagaataaccacgagggtaacaaattcagcaccccaggaacccattagcacccgcatcgccttctggataagctgaataccttccagcggcatgtaggttgtgccgttacccgccagtaatatcagcatggcgcttgccgtacagatgaccagggtgtcgataaaaatgccaatcatctggacaattccttgcgctgccggatgcggaggccaggacgccgctgccgctgccnnnnntggcgtcgaccccattcccgcctcattggaaaacatactgcgctgaaaaccgttagtaatcgcctggcttaaggtatatcccgccgcgccgcctgccgcttcctgccagccaaaagcactctcaaaaatagaccaaatgacgtggggaagttgcccgatatttattacgcaaatcaccaggctggtcagtacccagattatcgccatcaacgggacaaacccctgcatgagccgggcgacgccatgaagaccgcgaatgattgccagcagagcaaagacagcaagaataatgcctgtcaccagcgggggaaaatcaaaagaaaaactcagagctcgggcaacagcgtttgcctgaactccgctgaaaattatgccgtaggcgatgagcaaaaagacggcgaacagaacgcccatccagcgcatccccagcccgcgcgccatataccatgccggtccgccacgaaactgcccattgacgtcacgttctttataaagttgtgcaagggaacattcggcaaacgaggtcgccatgccgataaacgcggcaacccacatccaaaagacggctccaggtccaccggcggtaatagccagcgcaacgccggccaggttgccgctacccacgcgcgccgcaagactggtacacaatgactgaaatgaggttaaaccgcctggctgtggatgaatgctatttttaagacttttgccaaactggcggatgtagcgaaactgcacaaatccggtgcgaaaagtgaaccaacaacctgcgccgaagagcaggtaaatcattaccgatccccaaaggacgctgttaataaaggagaaaaaatctggcatgcatatccctcttattgccggtcgcgatgactttcctgtgtaaacgttaccaattgtttaagaagtatatacgctacgaggtacttgataacttctgcgtagcatacatgaggttttgtttaaaaatggcgggcgatatcaacgcagtgtcagaaatccgaaacagtctcgcctggcgataaccgtcttgtcggcggttgcgctgacgttgcgtcgtgatatcatcagggcagaccggttacatccccctaacaagctgtttaaagagaaatactatcatgacggacaaattgacctcccttcgtcagtacaccaccgtagtggccgacactggggacatcgcggcaatgaagctgtatcaaccgcaggatgccacaaccaacccttctctcattcttaacgcagcgcagattccggaataccgtaagttgattgatgatgctgtcgcctgggcgaaacagcagagcaacgatcgcgcgcagcagatcgtggacgcgactgacaaactggcagtaaatattggtctggaaatcctgaaactggttccgggccgtatctcaactgaagttgatgcgcgtctttcctatgacacagaagcgtcaattgcgaaagcaaaacgcctgatcaaactctacaacgatgcaggtattagcaacgatcgtattctgatcaaactggcttctacctggcagggtatccgtgctgcggaacagctggaaaaagaaggtatcaactgtaacctgaccctgctgttctccttcgctcaggctcgtgcttgtgcggaagcgggcgtgttcctgatctcgccgtttgttggccgtattcttgactggtacaaagcgaataccgataagaaagagtacgctccggcagaagatccgggcgtggtttctgtatctgaaatctaccagtactacaaagagcacggttatgaaaccgtggttatgggcgcaagcttccgtaacatcggcgaaattctggaactggcaggctgcgaccgtctgaccatcgcaccggcactgctgaaagagctggctgagagcgaaggggctatcgaacgtaaactgtcttacaccggcgaagtgaaagcgcgtccggcgcgtatcactgagtccgagttcctgtggcagcacaaccaggatccaatggcagtagataaactggcggaaggtatccgtaagtttgctattgaccaggaaaaactggaaaaaatgatcggcgatctgctgtaatcattcttagcgtgaccgggaagtcggtcacgctacctcttctgaagcctgtctgtcactcccttcgcagtgtatcattctgtttaacgagactgtttaaacggaaaaatcttgatgaatactttacgtattggcttagtttccatctctgatcgcgcatccagcggcgtttatcaggataaaggtatccctgcgctggaagaatggctgacatcggcgctaaccacgccgtttgaactggaaacccgcttaatccccgatgagcaggcgatcatcgagcaaacgttgtgtgagctggtggatgaaatgagttgccatctggtgctcaccacgggcggaactggcccggcgcgtcgtgacgtaacgcccgatgcgacgctggcagtagcggaccgcgagatgcctggctttggtgaacagatgcgccagatcagcctgcattttgtaccaactgcgatcctttcgcgtcaggtgggtgtgattcgcaaacaggcgctgatccttaacttacccggtcagccgaagtctattaaagagacgctggaaggtgtgaaggacgctgagggtaacgttgtggtacacggtatttttgccagcgtaccgtactgcattcagttgctggaagggccatacgttgaaacggcaccagaagtggttgctgcattcagaccgaagagtgcaagacgcgacgttagcgaataaaaaaatccccccgagcggggggatctcaagacaattagtgggattcaccaatcggcagaacggtgcgaccaaactgctcgttcagtacttcacccatcgccagatagattgcgctggcaccgcagatcagaccaatccagccggcaaagtggatgattgcggcgttaccggcaatgttaccgatcgccagcagggcaaacagcacggtcaggctaaagaaaacgaattgcagaacgcgtgcgcctttcagcgtgccgaagaacataaacagcgtaaatacgccccacagacccaggtagacaccaaggaactgtgcatttggcgcatcggtcagacccagtttcggcatcagcagaatcgcaaccagcgtcagccagaaagaaccgtaagaggtgaatgcggttaaaccgaaagtgttgccttttttgtactccagcagaccagcaaaaatttgcgcgatgccgccgtagaaaatgcccatggcaagaataataccgtccagagcgaaataacctacgttgtgcaggttaagcagaatggtggtcatgccgaagcccatcaggcccagcggtgccggattagccaacttagtgttgcccataattcctcaaaaatcatcatcgaatgaatggtgaaataatttccctgaataactgtagtgttttcagggcgcggcataataatcagccagtggggcagtgtctacgatcttttgaggggaaaatgaaaattttccccggtttccggtatcagacctgagtggcgctaaccatccggcgcaggcaggcgatttgcagtacggctggaatcgtcacgcgataggagctgccgctgaccgctttaaccccatttagtgccgcgcctacagggcctcccagccccgcgccgcgcagcaaaccatgcccaagtacgctcattgctgcgtgggtgcgtaaaatgcgggtcagttggctggaaagcagatgcgacacgccttttgccaataatttgtctttcatcagcagcggcagcagctcttccagctcattcaccctggcatcgaccgcgtgcagaaactcctgcttatgttcctcgtccattttcttccaggtattacgcagaaattgttccagtaactgttgctcaatttcaaacgtagacatctctttgtcggctttcagcttcaatcgttttgaaacatcgagcaaaatggcccgatacaatttaccgtgtccgcgcagtttgttggcgatactatcgccaccaaaatgctgtaattctccagcaatcagctgccagttgcggcgatgttgctcgggatgtccttccatcgatttaaacagttcgttgcgcatcagtacgctggagaggcgagttttgcctttttcattatgggtgagcagccgggcgaaatttgctaactgttcctcactacaatgctggagaaaatccagatctgaatcattcaggtaattaacattcattttttgtggcttctatattctggcgttagtcgtcgccgataattttcagcgtggccatatccgatgagttcaccgtatgaccggaaaaggtgatttttgagacgcagcgtttattgtcgttatcgctgttaatgttgatccagtcagtggtttgcccttcttttatttctgaaggaatattcaggctctgactggcgctacgggcggctttgaaataaaccgatgcaccgcttaactgtaaatcgccatggtcggcagagagttgtatgcgtttcacaatgcgacaaacaggaagtttcagcgccagatcgttggtttcgttacgcggcattgcaatgacnccgaggagtttatggtcgtttgcctgcgccgtgcagcacagcatcaggctaatcgccaggctggcggaaatcgtaaaaacggatttcataaggattctcttagtgggaagaggtagggggatgaatacccactagtttactgctgataaagagaagattcaggcacgtaatcttttctttttattacaattttttgatgaataccttgactgcgattcattctttatatgaataaaattgctgtcaattttacgtcttgtcctgccatatcgcgaaatttctgcgcaaaagcnnnaannatttttgcatctcccccttgatgacgtgggttacgaccccatttagtagtcaaccgcagtgagtgagtctgcaaaaaaatgaaattgggcagttgaaaccagacgtttcgcccctattacagactcacaaccacatgatgaccgaatatatagtggagacgtttagatgggtaaaataattggtatcgacctgggtactaccaactcttgtgtagcgattatggatggcaccactcctcgtgtgctggagaacgccgaaggcgatcgcaccacgccttctatcattgcctatacccaggatggtgaaactctggttggtcagccggctaaacgtcaggcagtgacgaacccgcaaaacaccctgtttgcgattaaacgcctgattggccgccgcttccaggacgaagaagtacagcgtgatgtttccatcatgccgttcaaaattattgctgctgataacggcgacgcatgggtcgaagttaaaggccagaaaatggcaccgccgcagatttctgctgaagtgctgaaaaaaatgaagaaaaccgctgaagattacctgggtgaaccggtaactgaagctgttatcaccgtaccggcatactttaacgatgctcagcgtcaggcaaccaaagacgcaggccgtatcgctggtctggaagtaaaacgtatcatcaacgaaccgaccgcagctgcgctggcttacggtctggacaaaggtactggcaaccgtactatcgcggtttatgacttgggtggtggtactttcgatatttctattatcgaaatcgacgaagttgacggcgaaaaaaccttcgaagttctggcaaccaacggtgatacccacctgggtggtgaagacttcgacagccgtctgatcaactatctggttgaagaattcaagaaagatcagggcattgacctgcgcaacgatccgctggcaatgcagcgcctgaaagaagcggcagaaaaagcgaaaatcgaactgtcttccgctcagcagaccgacgttaacctgccgtacatcactgcagacgcgaccggtccgaaacacatgaacatcaaagtgactcgtgcgaaactggaaagcttggttgaagatctggttaaccgttccatcgagccgctgaaagttgcgctgcaggacgctggcctgtccgtatctgatatcgacgacgttatcctcgttggtggtcagactcgtatgccaatggttcagaagaaagttgctgagttctttggtaaagagccgcgtaaagacgttaacccggacgaagctgtagcaatcggtgctgctgttcagggtggtgttctgactggtgacgtaaaagacgtactgctgctggatgttaccccgctgtctctgggtatcgaaaccatgggcggtgtgatgacgacgctgatcgcgaaaaacaccactatcccgaccaagcacagccaggtgttctctaccgctgaagacaaccagtctgcggtaaccatccatgtgctgcagggtgaacgtaaacgtgcggctgacaacaaatctctgggtcagttcaacctggatggtatcaacccggcaccgcgcggcnngccgcagatcgaagttaccttcgatatcgatgctgacggtatcctgcacgtttccgcgaaagataaaaacagcggtaaagagcagaagatcaccatcaaggcgtcttctggtctgaacgaagatgaaatccagaaaatggtacgcgacgccgaagctaacgccgaagctgaccgtaagtttgaagagctggtacagactcgcaaccagggcgaccatctgctgcacagcacccgtaagcaggttgaagaagcaggcgacaaactgccggctgacgacaaaactgctatcgagtctgcgctgactgcactggaaactgctctgaaaggtgaagacaaagccgctatcgaagcgaaaatgcaggaactggcacaggtttcccagaaactgatggaaatcgcccagcagcaacatgcccagcagcagactgccggtgctgatgcttctgcaaacaacgcgaaagatgacgatgttgtcgacgctgaatttgaagaagtcaaagacaaaaaataatcgccctataaacgggtaattatactgacacgggcgaaggggaatttcctctccgcccgtgcattcatctaggggcaatttaaaaaagatggctaagcaagattattacgagattttaggcgtttccaaaacagcggaagagcgtgaaatcaaaaaggcctacaaacgcctggccatgaaataccacccggaccgtaaccagggtgacaaagaggccgaggcgaaatttaaagagatcaaggaagcttatgaagttctgaccgactcgcaaaaacgtgcggcatacgatcagtatggtcatgctgcgtttgagcaaggtggcatgggcggcggcggttttggcggcggcgcagacttcagcgatatttttggtgacgttttcggcgatatttttggcggcggacgtggtcgtcaacgtgcggcgcgcggtgctgatttacgctataacatggagctcaccctcgaagaagctgtacgtggcgtgaccaaagagatccgcattccgactctggaagagtgtgacgtttgccacggtagcggtgcaaaaccaggtacacagccgcagacctgtccgacctgtcatggttctggtcaggtgcagatgcgccagggtttctttgccgtgcagcagacctgtccacactgtcagggccgcggtacgctgatcaaagatccgtgcaacaaatgtcatggtcatggtcgtgttgagcgcagcaaaacgctgtccgttaaaatcccggcaggggtggacactggagaccgcatccgtcttgcgggcgaaggtgaagcgggtgaacacggcgcaccggcaggcgatctgtacgttcaggttcaggttaaacagcacccgattttcgagcgtgaaggcaacaacctgtattgcgaagtcccgatcaacttcgctatggcggcgctgggtggtgaaatcgaagtaccgacccttgatggtcgcgtcaaactgaaagtgcctggcgaaacccagaccggtaagctattccgtatgcgcggtaaaggcgtcaagtctgtccgcggtggcgcacagggtgatttgctgtgccgcgttgtcgtcgaaacaccggtaggcctgaacgagaagcagaaacagctgctgcaagagctgcaagaaagcttcggtggtccaaccggcgagcacaacagcccgcgctcaaagagcttctttgatggtgtgaagaagttttttgacgacctgacccgctaacctccccaaaagcctgcccgtgggcaggcctgggtaaaaatagggtgcgttgaagatatgcgagcacctgtaaagtggcggggatcactccccgccgttgctcttactcggattcgtaagccgtgaaaacagcaacctccgtctggccagttcggatgtgaacctcacagaggtcttttctcgttaccagcgccgccactacggcggtgatacanatgacgatcagggcgacaatcatcaccttatgctgcttcattgctctcttctccttgaccttacggtcagtaagaggcactctacatgtgttcagcatatagggggcctcgggttgatggtaaaatatcactcggggcttttctctatctgccgttcagctaatgcctgagacagacagcctcaagcacccgccgctattatatcgctctctttaacccattctgttttatcgattctaatccggaagacgcctcgcatttttatggcgtaattttttaatgatttannnntttaactttaatttatctcttcatcgcaattattgacgacaagctggattatttttgaaatattggcctaacaaacatcgccgactgacaacaaattaattattacttttcctaattaatccctcagaaatcctcaccttaagctatgattatcagggcttagggtcacccgtcagcgcttacagccgtcaaaaacgcatctcaccgctgatggcgcaaattcttctatagatcgtaaaaaacgaattattcctacactataatctgattttaacgatgattcgtgcggggtaaaatagtaaaaacgatctattcacctgaaagagaaataaaaagtgaaacatctgcatcgattctttagcagtgatgcctcgggaggcattattcttatcattgccgctatcctggcgatgatgatggccaacagcggcgcaaccagtggatggtatcacgactttctggagacgccggttcagctccgggttggttcactcgaaatcaacaaaaacatgctgttatggataaatgacgcgctgatggcggtatttttcctgttagtcggtctggaagttaaacgtgaactgatgcaaggatcgctagccagcttacgccaggccgcatttccagttatcgctgctattggtgggatgattgtgccggcattactctatctggcctttaactatgccgatccgattacccgcgaagggtgggcgatcccggcggctactgacattgcctttgcacttggtgtgctgacgctattgggaagtcgtgttccgttagcgctgaagatctttttgatggctctggctattatcgacgatcttggggccatcattatcatcgcattgttctacactaatgacttatcgatggcctctcttggcgtcgcggctgtagcaattgctgtactcgcggtattgaatctgtgtggtgtacgccgcacgggcgtctatattctggttggcgtagtgttgtggactgcagtgttgaaatcgggggttcacgcaaccctggcgggggtaattgtcggcttctttattcctttgaaagagaagcatgggcgttctccagcgaagcgactggagcatgtgttgcacccgtgggtggcgtatctgattttaccactgtttgcatttgctaatgctggcgtttcactgcaaggcgtcacgctggatggcttgacctccattctgccattggggatcatcgctggcttgctgattggcaaaccgctggggattagtctgttctgctggttggcgctgcgtttgaaactggcgcatctgcctgagggaacgacttatcagcaaattatggcggtggggatcctgtgcggtatcggttttactatgtctatctttattgccagcctggcctttggtagcgtagatccagaactgattaactgggcgaaactcggtatcctggtcggttctatctcttcggcggtaattggatacagctggttacgcgttcgtttgcgtccatcagtttgacaggacggtttaccggggagccataaacggctcccttttcattgttatcagggagagaaatgagcatgtctcatatcaattacaaccacttgtattacttctggcatgtttataaagaaggttctgtggttggcgcagcggaggcgctttatttaacaccacaaaccattaccggacagattcgggcgctggaagagcgcctgcaaggcaaattatttaagcgcaagggacgtggtctcgagcccagcgagctgggggagctggtctatcgctatgccgataaaatgttcaccttgagccaggaaatgctggatatcgtgaactatcgcaaagaatccaatttattgtttgacgttggcgtggctgatgcactttccaaacgtctggtcagtagcgtgctgaatgctgcagtagtagaaggcgagccgattcatcttcgctgcttcgaatccacccacgaaatgctgctggagcaattaagccagcataaactggatatgatcatttccgactgtccgatagattctacgcagcaggaaggcctgttctccgtgagaattggcgaatgtggcgtgagtttctggtgtacaaatccaccgccggaaaaaccgttcccagcttgtcttgaagaacggcggcttttgattcctgggcgacgttcaatgttagggcgcaaattacttaactggtttaactcccagggattaaacgtagaaatccttggcgagtttgatgatgccgctttgatgaaagcttttggtgcgatgcacaatgcaatcttcgttgccccaacgctttatgcatatgacttttatgccgataaaactgtcgtagaaattggtcgcgtcgagaatgtgatggaagagtaccatgctatttttgctgagcggatgattcagcacccggcggtacagcgaatctgcaatacggattattctgcgctttttagtccagcggtgcgttaatcggcagctcccccaaagttaaggtgggggagatagattagttgtacattaccacgattttgactcggctcattatttgcccgcttgagacattgtttccatatgtacgcgggcgaataaatagaggaatctgattacttccttcatggggatgctgaaaagagtagtaattgcttttaccatactggatttcattcgtaccatcattggagagttgaaagcctatttgacccgcaccgtcctcactgttttctaactcattttttaatatgctggttcctgactcctgtatcgtcactggttcaaagtaatattcaacgtcactgggttcaaaaactaattcaccttgctcgccctggatgcagtcaaatcttatatgatgaaactgataattttcattattgatacgagacagtacaaatcgtccagtgtcgatggattgatcttcaaaaccacaggtcattaaatttacctgtaaaatagtatttaaannnnnnnnnnagcggacgctattacaattagtattattccctgtacatgaactcacttcaatttcgaacaacaaaggaaaaggagttcctggaaaaatatctgcggtgttggaactatctgatacagatgcgatagagtatggaatggtgaaatttatcgcagatagcatttcttctaaattataagatgacttccctggaagcgctattttttttaccgtcagattcaaaggggaaattaataatataatgacgacttccgactttaaaccttaaagcgttctgtgttaaaaaatgaactttaatggcgttggtcgtctcttgcaagtctgcacactcaatgatattcccagtattttcaattttttcggcggtgagattacctttcatactcagtggtttgagtatatatgttccacgttgttccccgacattggtcaatccacagggagcactttgcacaataaaagaatatagactcaatgtgattaataaaagccacttcatagtaaactccttttactnnnnnatatatgttttgttttcatcgataacgtgttgaaaagtaatagtacagaataaattctgttcatcattgagagcaacttttatgccagttggaatttcatctacgcgaataaaaaggcgactaccctggccaacgactccaatattgttttcctggagatccagtacgtcatagccaaaagttaatggcgaaccatcgggacgcagtgcctgtatataccagggcttacgttggtcagttgtaaactgcacataagaaactgctccacggtaaggcgcaataatttgacgattgccctgcaattctgtttcactttcactgtttgctgtatcaagtaccagatggttttcacgatgaggtatcatcaggtcgtaaacaacctggcctttgctgtttgttcggttgtatttttgtccattaatannnnnnnnnnnnaacccaggcgcatccagaattgcaaatgtatcggatagctggttagtgatattaataccaccgggccagacaactaatccactactaatacttccaccactttgccaggcgtttttagaatggctatagctgccatctattgtggcgatgggagttctccagcttaaattcgtaccaagcgatgtatcattattttgttgttgctgattaacatatataccataatttaactgatcatgttcaccggctatgccagtaattccagtattgttggaggaatagccatctttggaaaatgaggtcgaattcgataagttaatttggtgacgtgttttggcaatatcatccccccagtagaaaggaatggagataaacagattaaaacgctcctcttctttgtcgttttcatcataggattggctggcagagaaagtataactgatgcgttgccagctattggaataactgaattggtaatctttagcatttccacttcgcccccagtaattccgccaaagcgcacttaatgatacatttcccagattattggataaaggttgcatgatattggcagaaaggctattttttctgccaatatcataaaaatcgtcatagtcactctgatgatttattttatcattttcgtaaagatggtcgctgaatgtcctgtaatcctgcgaagcataacgccaggcggccacgctaaatcgagtggccgtttgtactagatatttattataggcgacctgatagctcgtaccttcgtgtgttatatcattatttaacttactactcgatcgtgtagcgtcaaaagagatggcacccagcggtgtattccaaccatttcccagagttatagcattatagttatcggataaaatcgtaccgccataaagtgtcaaaagattgttgaggccatatatataatttgcctcgagaaagtcctcctgattctttacaccatatatcttactgcgtccggcgataaaatcgaaatttgaaataccaggttgcagcatgttaggcacggaagagtagggcaccaaaaaggaacgaacactgccatctgcttcctttatgctgacatcgagatcagagccgctgcccgagagttgcaaatctgcgatagtaaatggtcccgggggaacctctttttggtaaatgatgtagccattttgcgaaaccgttatcaaggcattactttgcgcaacaccttgtactaaaggtgtaaagctctgcatagaatcaggtagcatttgcatatcgcgaaataagcgtattccgctaaatctcagagagtcgaatatgagtgaggatgtgtaattttctcctatctgaactgtgcttaatatctgcgaccagccatgttccaggtaaagagtattactttgccatgtgcctttcatatcatcgggtttgctatagctggcatcagagtgtaactgccaactaaataaatttaatccactgttaaatcggccataactggctgtattactgttattattgctgtcataagagcgatactgacttaaattataggaggtataaaaagcatcaatgccgcgatcccaactttccgggggaacgtaacctctttcaagttcattgatatacgcctgtggtactgttaaatttagtcggtgttcactgatatcccactgatattgtccaccatgaaccgctttatccagtaaaatacaattatcttctgtattgaggttaccggtctttacccccagtttggttagtagcaccttaggcagacatggtttgactggtgactctgggatcgtgatatcttgttttccacgccactggttatttacataaaaatcaagttcgtagtttcctggaagcggttgtttattatcgaaatgatattcggaaactttttctcctttcatgccgccgatcataaagtgcgtatcaaaagtttcttcagcataacccggaaaagaatacaaaaaaataatagcagcgacccatcgtgtcgtccttaacatgactttttcctgttatctcgcggcgattttactatggatgttattcccgtaatcatcaactaccgttagttcatattctgatgcgtggttattttttaatgtaatgtcgttatgcgaaaagggaggcagtaagatactttcattattaactttcacgttttgtgctttgatagttgtaaccgttatccagttggctgtttcgttgtttattgagatggcgttatttttctttttgatatttaattgagaaaggctttttttatctaccggagctattccgcttggacgccaaagtaactttatccggttttgcaatgcaagtttaattttgtttttccctgcattttgtggattgtttggagggatatccagaacatttagataaaataaactttctttattgtgaggcaaattgtttggcatttttcttattttaagttgttggccagaaccacctgctacacgacttactggcggtgtgagaataaatgtgacctgaattttttctggcgcgatagtggtgttcccatcatcgatccatgcctgaatcaaagaggcatttttactttgattcattaactgtacgagaacttctctgtttttttccggataaataatgcgcgtaccatagatgaccacaccggcatgaacaggtaaaataaaaaatgacatcagtaatgctgttattattctcacgtaatcactccgtaaataataccggtagcagagctaccggcaaaaaacgttaatctgcactgattttaatcgttacggttgactctacggagccttttgtaacaggattgccacttgtgcgggcatattgtgcatttaaattgagaaaatattgaccagagccattatctttcagcggtgtttttaaccctggtctcattctggtcaaagtcccatcatcgaggaaaatggcaaagccaatgttctcagcagttcctttattcagcgtaaagttattagcatcaaactctgatgctagtacttcgatacttggggctgtatttccgtcacactgaatttctaagtcatgagaggttgaaccggtttttaaagtatagatttcattattgataagttgattcattgcactggttacaacatcttcgacaacgatatctgttgtcgaatcaccattaacaaagtaacacgttgtatcaacaacttctcctctaatggttagtgttccttgatcgacatccttggcgaaggttgttgcgctaaacatcaacgttgtcgcaacgaagggaataatatactttttcataaatcatccttaattaactggtatggaaggtcactcgttttcaaacccgattatgtgatcaggttgttattatttagattaatgtttaaattttttaatttcttgatgtgaagttgatgaaagtttgaaaatttaatattcttaattattcccttctttataagaagagcaaggtgccatcattagagtgacagagtaggatgtttcagagcatgcttcagattattttttatttctctgcagttaattaataattatcacaggtaatttcattctgaaattacttcttttttggggtgttttaatcttgatgagatatttttttcataaggaacatagactcgttgatgctctgaaggtattttctcatttctggggatgttttgtcgtaatcgtgcataaactttttcagttctttatacacatcattatttagctttacattgtcgcgaactaaagtttgtaccaatggtatcaaaatttcgaaacgggacggtttgtcatcaatacttgccagggttttgaatactcctgtgtatctgtaacctaagtgcttattgacaagttgagtggtccatcggccaggcataatatcttcacagcgcaaattttttatcatggtattagtgaacgatgttccaaatatgttgctttttttaatgaagaggttgtttatttctccatttgaaaagatggtgtttgataagtcgctttcaaaacatgatatattggataatacacaaccaaaataatacccatatgaaaggttgctcttttctattgttatatttgatagcaacagtttatgtatattaatattaagggcagtcaaatactggatgttttgctcgttaagttcatgcatctccagcgatttattatagggtaataaaagtataaattcctttacattatctccgcagtaagaaaagacaacatcaaatttatcggtgatcatgttttcatttgagcagtaagctgatttctctattaaccgactgggcgagttttttaataaagataatttttcacatagttgtgaatatgccgcattgctagttttaaaattctgccatgttattttctggttatcatctgtcgatgaggcggggattttattgcattgctcattgtatagctcaggataaatattcttttttattagatttctgatttccttattaaaataactttttttcttgactattgcactgtacttagcgttttgtgacgtctcctgatgatcataaaatgactggagatttctgcaggcctcataaaatatttcaggagtgtatagctctgggtatatttcctgattgaagtttgcctttaaaannnnnnnaaatttttcatggcattcttgatatatcttaatctcttcagaaagacattcgcttgttctgtcatcaaaaacatccaatctaagtaatgtgatgcctttgtgtttaaaaaaagaaaattgaactgtatgttctatgagtttacatctataaaaatgtgcatctctcagatgagtatattgaaaaaaatgatggaggactggagatggtttaggcaaatcctggcttctgaaaaagtcatcaaacaaaattaagaactctgttttatactcgcaaaacacttttactaactcattttgtcttgttttatttattattacatcatctactatatttgatttataaagacaatgtggcgaagttgagataccatctgtcattatcagtccttgaagttgatgaatttttatnnnnttaatttatgagtgaatgtgactactatcaaaaatcgctcattaattttaagaagtacaatataaataggtatttaacctgtgttgattgctgttaataatttacaaggtctaatgaggagatatttatgaatggttaaagtatataggaatttaattcaaaaatagagtggtcttaagtttaatacctcaatgtgtatcacaatatccacattctttgtaggggagtctggagattgagtagatattcttgttcagaatgtatcagccgatggttctacgattcttaagccacgaagagttcagatagtgcaacggcatgtctcttttgactatctggcaaccggcagtgtgttctctcacgcatcacaaaagcagcaggcataaaaaaacccgcttgcgcgggctttttcacaaagcttcagcaaattggcaattaagccagtttgttgatctgtgcagtcaggttagccttatgacgtgcagctttgtttttgtggatcagacctttagcagcctgacggtccacgatcggttgcatttcgttaaatgctttctgtgcagcagctttgtcgccagcttcgatagctgcgtatactttcttgatgaaagtacgcatcatagagcgacggcttgcgttgtgcttacgagccttttcagactgaatggcgcgcttcttagctgatttgatattagccaaggtccaactcccaaatgtgttctatatggacaattcaaaggccgaggaatatgcccttttagccttcttttgtcaatggatttgtgcaaataagnnnnnnnnnnnnnnnnncactcgttacgtagtgatggcgcaggattctaccagcttgcggggtgtgaatacagcttttccgcgataaaaattgcagcaggcagtcagtttcttcccgtgatttgcgccatgaccatgacaatgaaaagccacttctttctgatttcggtactcaatcgccggttaaccttgaccgctgtacaaggtatactcggacgattttcactgttttgagccagacatgaagctgatacgcggcatacataatctcagccaggccccgcaagaagggtgtgtgctgactattggtaatttcgacggcgtgcatcgcggtcatcgcgcgctgttacagggcttgcaggaagaagggcgcaagcgcaacttaccggtgatggtgatgctttttgaacctcaaccactggaactgtttgctaccgataaagccccggcacggctgacccgactgcgggaaaaactacgttaccttgcagagtgtggcgttgattacgtgctgtgcgtacgtttcgacaggcgtttcgcggcgttaaccgcgcaaaatttcatcagcgatcttctggtgaagcatttgcgggtaaaattcctcgccgtgggggatgatttccgctttggcgctggtcgggaaggcgatttcttgttattacagaaagcgggcatggaatacggcttcgatatcaccagtacgcaaactttttgcgaaggtggcgtgcgtatcagcagcaccgccgtgcgtcaggcccttgcggatgacaatttggctctggcagaaagtttactggggcacccgtttgccatctccgggcgtgtagtccacggtgatgaattagggcgcactataggtttcccgacggcgaatgtaccgctacgccgtcaggtttccccggtgaaaggggtttatgcggtagaagtgctgggcctcggtgaaaagccgttacccggcgtggcaaacatcggaacacgcccaacggttgccggtattcgccagcagctggaagtgcatttgttagatgttgcaatggacctttacggtcgccatatacaagtagtgctgcgtaaaaaaatacgcaatgagcagcgatttgcttcgctggacgaactgaaagcgcagattgcgcgtgatgaattaaccgcccgcgaattttttgggctaacaaaaccggcttaagcctgttatgtaatcaaaccgaaacacggaaccgagaatctgatgagtgactataaatcaaccctgaatttgccggaaacagggttcccgatgcgtggcgatctcgccaagcgcgaaccgggaatgctggcgcgttggactgatgatgatctgtacggcatcattcgtgcggctaaaaaaggcaaaaaaaccttcattctgcatgatggccctccttatgcgaatggcagcattcatattggtcactcggttaacaagattctgaaagacattatcgtgaagtccaaagggctttccggttatgactcgccgtatgtgcctggctgggactgccacggtctgccgatcgagctgaaagtagagcaagaatacggtaagccgggtgagaaattcaccgccgccgagttccgcgccaagtgccgcgaatacgcggcgacccaggttgacggtcaacgcaaagactttatccgtctgggcgtgctgggcgactggtcgcacccgtacctgaccatggacttcaaaactgaagccaatatcatccgcgcgctgggcaaaatcatcggcaatggtcacctgcacaaaggcgcgaagccggtgcactggtgcgtagactgccgttctgcactggcagaagcggaagttgagtattacgacaaaacttctccgtccattgacgtcgctttccaggcggtcgatcaggatgcgctgaaagcgaaatttggcgtaagcaacgttaacggcccaatctcgctggtgatctggaccactacgccgtggactctgcctgcgaaccgcgcaatctctattgcacctgatttcgactatgcgctggtgcagatcgacggtcaggccgtgattctggcgaaagatctggttgaaagcgtaatgcagcgtatcggcgtgaccgattacaccattctcggcacggtaaaaggtgcggagcttgagctgctgcgctttgcccatccgtttatgggcttcgacgtcccggcaatcctcggcgatcacgttaccctggatgccggtaccggtgccgttcacaccgcgcctggccacggcccggacgactatgtgatcggtcagaaatacggcctggaaaccgctaacccggttggcccggacggcacttatctgccgggcacttatccgacgctggatggcgtgaacgtcttcaaagcgaacgacatcgtcgttgcgctgctgcaggaaaaaggcgcgctgctgcacgttgagaaaatgcagcacagctatccgtgctgctggcgtcacaaaacgccgatcatcttccgcgcaacgccgcagtggttcgtcagtatggatcagaaaggtctgcgcgcgcagtctctgaaagagatcaaaggtgtgcagtggatcccggactggggccaggcgcgtatcgagtcgatggtcgctaaccgtcctgactggtgtatctcccgtcagcgtacctggggcgtaccgatgtctctgttcgtgcacaaagacacggaagagctgcatccgcgtaccctcgaactgatggaagaagtggctaaacgcgttgaagttgatggcatccaggcgtggtgggatcttgatgcgaaagagatcctcggcgatgaagctgatcagtatgtgaaagtgccggatacgctggatgtatggtttgactccggctctactcactcttctgttgttgacgtgcgcccggaatttgccggtcacgctgcggacatgtatntggaaggttctgaccaacaccgtggctggttcatgtcttctctgatgatctccaccgcgatgaagggcaaagcgccgtatcgtcaggtgctgacccacggctttaccgtagatggtcagggccgcaagatgtctaaatccatcggcaacaccgtgtcgccgcaggatgtgatgaacaaactgggcgcggatattctgcgtctgtgggtggcatcaaccgactacaccggtgaaatggccgtttctgacgagatcctgaaacgtgctgccgacagctatcgtcgtatccgtaacaccgcgcgcttcctgctggcaaacctgaacggttttgatccggcaaaagatatggtgaaaccggaagagatggtagtactggatcgctgggccgtaggttgtgcgaaagcggcacaggaagacatcctcaaggcatacgaagcatacgatttccacgaagtggtacagcgtctgatgcgcttctgctccgttgagatgggttccttctacctcgacatcatcaaagaccgtcagtacaccgccaaagcggacagcgtggcgcgtcgtagctgccagactgcgctgtatcacatcgcagaagcgctggttcgctggatggcaccaatcctctccttcaccgctgatgaagtgtggggctacctgccgggcgaacgtgaaaaatacgtcttcaccggcgagtggtacgaaggtctgtttggtctggcagacagtgaagcaatgaacgatgcgttctgggacgagctgttgaaagtgcgtggcgaagtgaacaaagtcattgagcaggcgcgnnnngacannnnngtgggtggctcgctggaagcggcagtaaccttgtatacagaaccggaactggcggcgaaactgaccgcattgggcgatgaattacgatttgtcctgttgacctccggcgctaccgttgcagactataacgacgcacctgctgatgctcagcagagtgaagtgctcaaagggctgaaagtcgcgttgagtaaagccgaaggtgagaagtgcccacgctgctggcactacacccaggatgtcggcaaggtggcggaacacgcagaaatctgcggccgctgtgtcagcaacgtcgccggtgacggtgaaaaacgtaagtttgcctgatgagtcaatcgatctgttcaacagggctacgctggctgtggctggtggtagtcgtgctgattatcgatctgggcagcaaatacctgatcctccagaactttgctctgggggatacggtcccgctgttcccgtcgcttaatctgcattatgcgcgtaactatggcgcggcgtttagtttccttgccgatagcggcggctggcagcgttggttctttgccggtattgcgattggtattagcgttaccctggttgtgatgatgtatcgctcgaaggccacgcagaagctaaacaatatcgcctacgcgctgattattggcggcgcgctgggcaacctgttcgaccgcctgtggcacggcttcgttgtcgatatgatcgacttctacgtcggcgactggcacttcgccaccttcaacctcgccgatactgccatctgtgttggtgcggcactgattgtgctggaaggttttttgccttctaaagcgaaaaaacaataataaaccctgccggataaggcctacagattgctgcgaaatcgtaggccgcatccggcaaaaatcctcaaaatataagagcaaacctgcatgtctgaatctgtacagagcaatagcgccgtcctggtgcacttcacgctaaaactcgacgatggcaccaccgccgagtctacccgcaacaacggtaaaccggcgctgttccgcctgggcgatgcttctctttccgaagggctggagcaacacctgctggggctgaaagtgggcgataaaaccactttctcgctggagccagatgcggcgtttggcgtgccgtcaccggacctgattcagtacttctcccgccgtgagtttatggatgcaggcgagccagaaattggcgcaataatgctttttaccgcaatggatggcagtgagatgcctggcgtgatccgcgaaattaacggcgactccattaccgtcgatttcaaccatccgctggccgggcagaccgttcattttgatattgaagtgctggaaatcgatccggcactggaggcgtaacatgcagatcctgttggccaacccacgtggtttttgtgccggggtagaccgcgctatcagcattgttgaaaacgcgcttgccatttacggcgcaccgatatatgtccgtcacgaagtggtgcataaccgctacgtggtcgatagcctgcgcgagcgtggagctatctttattgagcagatcagcgaagtgccggacggcgcgatcctgatcttctccgcacatggtgtttctcaggcggtacgtaacgaagcgaaaagccgtgatttgacggtattcgacgccacctgtccgctggtgaccaaagtgcatatggaagtcgcccgcgccagccgtcgtggcgaagagtctattctcatcggtcacgccgggcacccggaagtggaagggacgatggggcagtacagcaaccctgaagggggaatgtatctggtcgaatcgcctgacgatgtgtggaaactgacggtcaaaaacgaagagaagctctcctttatgacccaaaccacgctgtcggtagatgacacgtctgatgtgatcgacgcgctgcgtaaacgcttcccgaaaattgtcggtccgcgcaaagatgacatctgctacgccacgactaaccgtcaggaagcggtacgcgccctggcagaacaggcggaagttgtgttggtggtcggttcgaaaaactcctccaactccaaccgtctggcggagctggcccagcgtatgggcaaacgcgcgtttttgattgacgatgcgaaagatatccaggaagagtgggtgaaagaggttaaatgcgtcggcgtgactgcgggcgcatcggctccggatattctggtgcagaatgtggtggcacgtttgcagcagctgggtggtggtgaagccattccgctggaaggccgtgaagaaaatattgttttcgaagtgccgaaagagctgcgtgtcgatattcgtgaagtcgattaagtcattagcagcctaagttatgcgaaaatgccggtcttgttatcggnnnnttttatggagaaaacatgcgcttacctatcttcctcgatactgaccccggcattgacgatgccgtcgccattgccgccgcgatttttgcccccgaactcgacctgcaactgatgaccaccgtcgcgggtaatgtctcggttgagaaaactacccgtaacgccttgcaactgctgcatttctggaatgcggagattccgctcgcccagggagccgctgtgccgctggtacgcgcaccgcgtgatgcagcatctgtgcacggcgaatcgggaatggctggctacgactttgttgagcacaaccgaaagccactcgggataccggcgtttctggcgattcgggatgccctgatgcgtgcaccagagcccgttaccctggtggccatcggcccgttaaccaatattgcgctgttactttcacaatgcccggaatgtaaaccgtatattcgccgtctggtgatcatgggtggttctgccggacgcggcaactgtacgccaaacgccgagtttaatattgctgccgatccagaagctgctgcctgtgtcttccgcagtggtattgaaatcgtcatgtgcggtttggatgtcaccaatcaggcaatattaactcctgactatctctctacactgccgcagttaaaccgtaccgggaaaatgcttcacgccctgtttagccactaccgtagcggcagtatgcaaagcggcttgcgaatgcacgatctctgcgccatcgcctggctggtgcgcccggacctgttcactctcaaaccctgttttgtggcagtggaaactcaaggcgaatttacctcaggcacgacggtggttgatatcgacggttgcctgggcaaaccagccaatgtacaggtggcattggatctgaatgtaaaaggcttccaacagtgggtggctgaggtgctggctctggtgccgtaacctgtcacatgttatcggcatgcagtcattcatcgactcatgcctttcactgatatccctccctgtttatcattaatttctaattatcagcgtttttggctggcggcgtagcgatgcgctggttactctgaaaacggtctatgcaaattaacaaaagagaatagctatgcatgatgcaaacatccgcgttgccatcgcgggagccggggggcgtatgggccgccagttgattcaggcggcactggcattagaaggcgtgcagctgggcgcggcgctggagcgcgaaggatcttctttactgggcagcgacgccggtgagctggctggtgcagggaaaacaggcgttaccgtgcaaagcagtcttgatgcgataaaagatgattttgatgtgtttatcgattttacccgtccggaaggtacgctgaaccatctcgctttttgtcgccagcatggcaaagggatggtgatcggcactacggggtttgacgaagccggtaaacaggcaattcgtgacgccgccgccgatattgcgattgtctttgccgccaattttagcgttggcgttaacgtcatgcttaagctgctggagaaagcagccaaagtgatgggtgactacaccgatattgaaattattgaagcacatcatagacataaagttgatgcgccgtcaggcaccgcactggcaatgggagaggcgatcgcccacgcccttgataaagatctgaaagattgcgcggtctacagtcgtgaaggccataccggtgaacgtgtgcctggtaccattggttttgccaccgtgcgtgcaggtgacatcgttggcgaacataccgcgatgtttgccgatattggcgagcgtctggagatcacccataaggcgtccagccgcatgacatttgctaacggtgcggtaagatcggctttgtggttgagtggtaaggaaaatggtctttttgatatgcgagatgtgcttgatctcaataatttgtaaccacaaaatgtttatgatgatgcaaaagtaacatatttaatttattaattataaagggctttaatttttagcccttttatttttggtgttatgcttttaatttttctataactgccaaaaattacatgttttgtcttctatttttgttgtcttaatgtaaattttgaccatttggtccacttttgcctgctcgtttttatttcatgcaatcttcttgctgcgcaagcgttttccagaacaggttagatgatctttttgtcgcttaatgcctgtaaaacatgcatgagccacaaaataatataaaaaatcctgccattaagttgacttttagcgcccatatctccagaatgccgccgtttgccagaaattcgtcggtaagcagatttgcattgatttacgtcatcattgtgaattaatatgcaaataaagtgagtgaatattctctggagggtgttttgattaagtcagcgctattggttctggaagacggaacccagtttcacggtcgggccataggggcaacaggttcggcggttggggaagtcgttttcaatacttcaatgaccggttatcaagaaatcctcactgatccttcctattctcgtcaaatcgttactcttacttatccccatattggcaatgtcggcactaatgacgccgatgaagaatcttctcaggtacatgcacaaggtctggtgattcgcgacctgccgctgattgccagcaacttccgtaataccgaagacctctcttcttacctgaagcgccataacatcgtggcgattgccgatatcgatacccgtaagctgacgcgtttactgcgcgagaaaggcgcacagaatggctgcattatcgnaggcgataacccggatgcggcgctggcgttagaaaaagcccgcgcgttcccaggtctgaatggcatggatctggcaaaagaagtgaccaccgcagaagcctatagctggacacaagggagctggacgttgaccggcggcctgccagaagcgaaaaaagaagacgagctgccgttccacgtcgtggcttatgattttggtgccaaacgcaacatcctgcggatgctggtggatagaggctgtcgcctgaccatcgttccggcgcaaacttctgcggaagatgtgctgaaaatgaatccagacggcatcttcctctccaacggtcctggcgacccggccccgtgcgattacgccattaccgccatccagaaattcctcgaaaccgatattccggtcttcggcatctgcctcggtcatcagctgctggcgctggcgagcggtgcgaagactgtcaaaatgaaatttggtcaccacggcggcaaccatccggttaaagatgtggagaaaaacgtggtgatgatcaccgcccagaaccacggttttgcggtggatgaagcaacattacctgcaaacctgcgtgtcacgcataaatccctgttcgacggtacgttacagggcattcatcgcaccgataaaccggcgttcagcttccagggtcaccctgaagccagccctggtccacacgacgccgcgccgttgttcgaccactttatcgagttaattgagcagtaccgtaaaaccgctaagtaatcaggagtaaaagagccatgccaaaacgtacagatataaaaagtatcctgattctgggggcgggcccgattgttatcggtcaggcgtgtgagtttgactactctggcgcgcaagcatgtaaagccctgcgcgaagagggttaccgcgtcattctggtgaactccaacccggcgaccatcatgaccgacccggaaatggccgatgcgacctacatcgagccgattcactgggaagtggtacgtaagattattgaaaaagagcgcccggacgcggtgctgccaaccatgggcggtcagacggcgctgaactgcgcgctggagctggaacgtcagggcgtgttggaagagttcggcgtcaccatgattggtgccactgccgatgcgattgataaagcagaagaccgccgtcgtttcgacgtagcgatgaagaaaattggtctggaaaccgcgcgttccggtatcgcacatacgatggaagaagcgctggcggttgccgctgacgtgggcttcccgtgcattattcgcccatcctttaccatgggcggtagcggcggcggtatcgcttataaccgcgaagagtttgaagaaatttgcgcccgcggtctggatctctctccgaccaaagagttgctgattgatgagtcgctgatcggctggaaagagtacgagatggaagtggtgcgcgataaaaacgacaactgcatcatcgtctgctctatcgaaaactttgatgcgatgggcatccacaccggtgactccatcactgtcgcgccagcccaaacgctgaccgacaaagaatatcaaatcatgcgtaacgcctcgatggcggtgctgcgtgaaatcggcgttgaaaccggtggttccaatgtccagtttgcggtgaacccgaaaaacggtcgcctgattgttatcgaaatgaacccacgcgtgtcccgttcttcggcgctggcgtcgaaagcgaccggtttcccgattgctaaagtggcggcgaaactggcggtgggttacaccctcgatgaactgatgaacgacatcactggcggacgtactccggcctccttcgagccgtccatcgattacgtggttaccaaaattcctcgcttcaacttcgaaaaattcgccggtgctaacgaccgtctgaccactcagatgaaatcggttggcgaagtgatggcgattggtcgcacgcagcaggaatccctnnnnannnngctgcgcggcctggaagtcggtgcgactggattcgacccgaaagtgagcctggatgacccggaagcgttaaccaaaatccgtcgcgaactgaaagacgcaggcgcagagcgtatctggtacatcgccgatgctttccgcgcgggcctgtctgtggacggcgtcttcaacctgactaacattgaccgctggttcctggtacagattgaagaactggtgcgtttggaagagaaagtggcggaagtgggcatcactggcctgaacgctgaattcctgcgccagctgaaacgcaaaggctttgccgatgcgcgcttggcaaaactggcgggcgtacgcgaagcggaaatccgtaagctgcgtgaccaatatgacctgcacccggtctacaagcgcgtggatacctgtgcggcagagtttgccaccgacaccgcttacatgtactccacttatgaagaagagtgcgaagcgaatccgtctaccgaccgtgaaaaaatcatggtgcttggnggcggtccaaaccgtatcggtcagggtatcgaattcgactactgctgcgtacacgcctcgctggcgctgcgtgaagacggttacgaaaccattatggttaactgtaacccggaaaccgtctctaccgactacgacacttccgatcgcctctacttcgagccggtaactctggaagatgtgctggaaatcgtgcgtattgagaagccgaaaggcgttatcgttcagtacggcggtcagaccccgctgaaactggcgcgtgcactggaagccgctggcgtaccggttatcggcaccagcccggatgctatcgaccgtgcggaagaccgtgaacgcttccagcatgcggttgaccgtctgaaactgaaacaaccggcgaacgccaccgttactgctattgaaatggcagttgagaaggcaaaagagattggctacccgctggtggtgcgtccgtcttacgttctcggcggtcgggcgatggaaatcgtctatgacgaagctgacctgcgtcgctacttccagacggcggttagcgtgtctaacgatgcgccagtgttgctggatcatttccttgatgacgcagtagaagttgacgtggatgccatctgcgacggcgaaatggtgctgattggcggcatcatggagcacatcgagcaggcgggcgtgcactccggtgactccgcatgttcgctgccagcgtacaccttaagtcaggaaattcaggatgtaatgcgccagcaggtgcagaaactggccttcgaattgcaggtgcgcggcctgatgaacgtgcagtttgcggtgaaaaacaacgaagtctacctgattgaagttaacccgcgtgcggcgcgtaccgttccgttcgtctccaaagccaccggcgtaccgctggcaaaagtggcggcgcgtgtgatggctggcaaatcgctggctgagcagggcgtaaccaaagaagttatcccgccgtactactcggtgaaagaagtggtgctgccgttcaataaattcccaggcgttgacccgctgttagggccagaaatgcgttctaccggggaagtcatgggcgtgggccgcaccttcgctgaagcgtttgccaaagcgcagctgggcagcaactccaccatgaagaaacacggtcgtgcgctgctttccgtgcgcgaaggcgataaagaacgcgtggtggacctggcggcaaaactgctgaaacagggcttcgagctggatgcgacccacggcacggcgattgtgctgggcgaagcgggtatcaatccgcgtctggtaaacaaggtgcatgaaggccgtccgcacattcaggaccgtatcaagaatggcgaatatacctacatcatcaacaccacctcaggccgtcgtgcgattgaagactcccgcgtgatccgtcgcagtgcgctgcaatataaagtgcattatgacaccaccctgaacggtggtttcgctaccgcgatggcgctgaatgccgatgcgactgaaaaagtaatttcggtgcaggaaatgcacgcacagatcaaataatagcgtgtcatggcggatatttttcatccgctaatttgatcgaataactaatacggttctctgatgaggaccgttttttttgcccattaagtaaatcttttggggaatcgatatttttgatgacataagcaggatttagctcacacttatcgacggtgaagttgcatactatcgatatatccacaattttaatatggccttgtttaattgcttcaaaacgagtcatagccagacttttaatttgtgaaactggagttcgtatgtgtgaaggatatgttgaaaaaccactctacttgttaatcgccgaatggatgatggctgaaaatcggtgggtgatagcaagagagatctctattcatttcgatattgaacacagcaaggcggttaataccctgacttatattctgtcggaagtcacagaaataagctgcgaagttaagatgatccctaataagctggaagggcggggatgccagtgtcagcgactggttaaagtggtcgatatcgatgagcaaatttacgcgcgcctgcgcaataacagtcgggaaaaattagtcggcgtaagaaagacaccgcgtattcctgccgttccgctcacggaacttaaccgcgagcagaagtggcagatgatgttgtcaaagagtatgcgtcgttaatgtcatttcgatgataccgtgcgacctggtcgccggatgcgatgctggcgcatcttatccggcctacggttgctctccagcagagttggataaggcgtttacgccgcatccggcaagatcaccgtttaggcgtcacatccgtcgtcccctgcaaacgggggcgattttcctccatttgcctcagtggctgtgtttcatgtaacgatgcatgacagcgcccgacaagatcctgatactctttggtattcaaccgtttccagtgtaactcgtcgtcactaacactgcgtacagcgcgggctggcgtacccatcaacaactggcgtttctcgccgtgaaagcctgctttgacaaagctcatggcggcaacaatgctctcttcgccaatgaccgcgccatccataatcacgctgttcatcccgaccaatgcatcgcgaccaatcacacaaccatgcaggatcgctccgtgcccgatatggccgttttccccaacgatggtgtcagtgtcggtgtagccatgcataatgcagccatcctgaatattggctcccgcttgcacgatcaaccgcccgtagtcaccacgcagtgaggcgagtgggccgatgtagacaccggctcccacaatcacatcgccaatcaagacggcactgggatggacaaacgccgtcgggtgaaccaccggaattaacccctcaaaggcgtaatagctcacggttgttaacgtcctttccacaccggatcgcgcttctcggcaaacgccagcggcccttcaatggcatcttccgaatgcagaaccgatggatagtgtttcaacacgncgctgcgaatatagcgatacgattcttctaccggcatttcgctggtggtgcggtagatctctttcagcgccgcaatcgccagcggggcgctgttaaccagctgctgagccagttcgcgggcgttatccatcagttccgcctggctaaccacgcggttgactatcccccaacgcagcgcctcttctgcgcccattcgtctgccggtcatcaccatttcattgacgatggcaggcggcaggatcttcggcagacgcagcacaccgccgctgtcaggaacgatgcccagtttggcttccggcagggcgaagctggcgttatcggcacaaacaataaaatctgccgccagcgccagttcgaaaccgccgccaaaggcgtagccgttcacagctgcgataaccggtttgtcgagattgaaaatttcggttaatcccgcaaaaccacccgggccaaagtcagcatccggtgcttcgccttctgctgccgcttttaaatcccagcccgcggaaaagaatttctctccggcaccggtaataatggcgacacgtaattgcggatcgtcacggaaatttagaaatacttcgcccatttcaaagctggtttttgcatcaatagcattcgcttttgggcgatcaagagtaatttccagaattgatccattgcgggtcagatgtaatgattcactcattccttttctccatttttgctttttcagggacgacaacatccctgcaaaaaatgcatattgttttagagcgtgattattagctggcagggtagttccctgccgtttcatttatttcagattctttctaattattttccccgagcaattacgtggcagatcttttctgatctccagataagagggcactttaaatttcgccatattttgttcgcagaagcggaaaaattcctcttcgctcaatgtttcaccttcattcagcaccacaaatgctttgatggcttcatcgcgaatcgaatctttaatacccacaaccacgatatcctgaatttttggatgggtggcgatgatattttccagctccacgcaggagacattctcgccaccgcgtttgatcatattgcagcggcgatcgatgaaataaaaaaagccttcttcgtcgcggtatccggtatcgccggtatgcagccagccatcagcttccagcacttttgcagtggctttcgggttgagaaaatactctttgaagatggttttccctggtacgcctttaatacagatttcaccgatctcacctgccgggagcgggcgattgtgatcgtcgcggatctccgcttcgtagcaaaaccccgcccgaccaatcgacggccagcgtcgtttatcgccagggcgatcgccgataatgcccacaatggtttccgtcatcccataagacgtcagcaagcgaacaccgaagcgttcacaaaatgtgtctttttcctgctccgacaagttgagataaaacatcacttcccgcaggcggtgttgccgatcgttcgctgaaggcggctgcaccatcaacgtacgaatcatcatcggaatacattcggtaatggtggcgcggtacttctgtacctgtccccagaaggcgcgggcgctgtatttctcgaccagcacaaaggtggccccggcagaaaacgccgccatcgccgcagtacactggcaatcgatatgaaacgcaggcattaccgtcaggtagacgtcatcgtcacgcagtgcacactgccaggcggagtaatatccagcgaagcgcaggttgtaatgggtaatcaccacacctttcggtcgggaggtggtgccggaggtgaagagaatttccgccgtatcgtcagtcgatagcggcggtgcatagcacaaggtggcaggttgttgatttttcagttgagtaaacgaactcacgccatcatcagcgggaagtgccacatctgtcaggcaaatgtgccgcaattgagtggcatcttcttgctgaatctgttgatacataggatagaattgcgcactggtcaccagcaggcacgcctggctattttgcaggatccacgcactttcctcgcgtaacaggcgggcgttaatcggcaccataatcgcgccaatttttgccagcccgaaccagcaaaagataaattccgggcagttgtcgagatgtagtgcaaccttgtcgcctttgcgaatccccagcgtataaaacaggtttgccgtgcggttaatctcctgatttaactcaagataactataccggttaacgactccgccgctggattcacaaatcagcgccgttttatgaccgtaaacgtccgccagatcgtcccacatttgacgtagatgttgtccgccaatgatatccattgcacctctatccatttttgttcgtttgttattgggcgggcgctagtcaggcaagccgactgacgccacgcgtttagtcctcaactttggccagacctttgctgaccaactcctgaatgtcgttttcgctgtagccgatatttttcaaaatggcagccgtgtccatgccatgtgagggcattccgcgccagatttgtccggggttatttttgaatttcggcatgatgttcggccctttgcaggtgcgaccatccatcgtttgccactgagtgattgattcacgggcaacatactgtggattgctttccagttccggtacggtcagtactttggcacaggcgatattcagttcggcaaagcgttctttaacttctgcgatggtatgtgccgccagccaggcatcgagtttttcttctaccagtgggccgtaagggcattcgatacggtggataagctgagtgccttccgggatttccggcgtaccgagtagatgtgcgaggccaatatctttaaagcactcttcaatttgggtaatgcccaccagttccatcacgatgtagccgtcggcacatttatacagaccgcaaccggcatagtagggatctttacctttgctcatgcgcgggcacatttcgccgccgttgaagtaatccatcatgaagtactggcccatacgcagcatcacttcatacatggcgatgtcgatactttcgcctttaccggtttcacgcgctttatgcagtgctgccagcgccgccgtggtggcggtcaggccagaaaagtaatcggcggtatacgggaaggcaggcattggctggtcaacatcaccgttctgaatcaggtaaccactgaaggcctgggcgatggtgttataggccggaagattggtgtactcctcggtgccgtactgaccaaaaccggacaggtgagcgataaccagtttcgggttgtgttgccacagtacttcatcggtaatgccacgacgggcaaaggccggacctttactggcttcgatgaagatatcggtggtttccattaatttcagaaacgcttcgcggccttcatctttgaaaatatttaacgacagcgcgtgcaaattgcggcgggagagttgcgggtagttcggttgaacgcgaatggtgtcggcccaggcgacgttctcgatccagataacttccgcaccccattctgcgaacatttgcccggcgaacggcccggcaatttcgataccggagaagacaacgcgcaatccggccaacggcccgaatttcggcatgggtagatgatccattattagctcctgaaaaatttatgtagcgcatgactgccggatgcggcgtaaacgccttatccggcctacattcgtgctcccgtaggcctgataagacgcgtcagcgtcgcatcaggcagcgcacggacttagcggtattgcttcagcaccgcacgacccagcgtcaggatctgcatttcgtcagatcctccggaaacgcggtctacacgcaggtcacgccagaagcggctgatgcggtggttgcccgcaatcccgacaccgcccagcacctgcattgcgctatccaccacttcaaatgccgcattggcgcagaagtatttgcacatcgctgcatcgccagaggtgatggtgccgttgtctgctttccacgctgcttcatacagcatgtttttcatggagtttaatttgatcgccatgtgggcgaatttttcctgaatcaactggaaacgaccaatagcctcgccaaactgcacgcgctggttggcgtagcgcgccgcatcttcaaaggcgcacatcgccgtaccgtagttggtcagggctaccaggaaacgttcatggtcgaactcttctttgacgcggttaaagccgttaccttcccgaccgaacatgtctttctcgtccagttccacatcgtcaaaggtgatttcacagcagctatccatacgcagaccgagcttctcaagtttggtcactttgatgcccggtttgctcatatcaacaaaccattcggtgtagacaggtttgtccggagaagccccgtcgcgcgccatcaccacgatgtacggggtgtaggcgctactggtaataaaacacttactaccattaagataaatcttaccatttctacgggtataagtcgttttcaggctacccacgtcggagcccgcgcccggttcggtaatcgctgagttccacatctgcttaccggtgccgcggaaagccataatcttgtcgatctgctcttgtgtgccttcgcgcaggaaggtattgaacccgcccggcaactggtacagtacataggttggtgcccccagacgtcccagctccatccacacggcggcgagagtaacaaaccccgcgtccagaccaccgtgctcttcagggatcagcagactgtcgatacccatatccgccagtgctttgacaaaacgttccgggtagacgctgtcacggtcgcactcggcaaaataggcctcccagttttcgctggccatcagttcgcggataccggcgacaaacagttcctgctcatcatttaaattaaaatccatctttcaacctcttgatattttgggggttaattaatctttccagttctgtttcgcgtctttaataaaggagagcgtcaccataatgttgacgaagaacagcgggcatcctccggcgataatggcagtttgaatcggtttcaggccgccgagcgccagcaaaacaataccgataatgccaaccagaattgaccaaccgatacgcaccagcagcggtggttcttcaccatcgcgtacttcgcggcaagtggacatcgccagggtataagagcaggcgttaaccagcgtaacggtggcaataaagcagaggatgaagaagccccacatggtggcggtgctgagcggcagancggcccaggtttcgatgatggcgcgcgccacaccgtactgttcgatcagatttggaatgttgatgatgtttttatctatcaacagcagagtgttactaccgagtacagtccacaggatccaggtggatgctgtcagtcccatcaccatgccgaagcacagttcacgcacagtacgaccacgggagatgcgggcgaggaagatactcatctggatggcgtaaatcacccaccatgcccagtagaacacggtccagccctgcgggaagccgcctttagcgatgggatcggtatagaacaacatgcgcggcagatacatcagcaacatccccaccgaatcggtgaagtagttcatgatgaagctggcaccgctgacgatgaacacccaacccagcatcaggaagctcaggtaantacgcacgtcactggcgatacgtacccctttttgcagaccgcaggcgacgcaaatggcgttgaggataatccagcaggtaatgatgatagcgtccagttgcagggtatgcggaatgccaaacaaccattgcatacactcggtcaccagcggcgtggcaaggcccagactggtacccatcgcgaagatcaaggcgacgagatagaagttgtcgacgatagtgccgaacaaccctttggcgtgtttttcacctaccagcggcaccagggtggagctggggcgaatcacttccattttgcggacaaagaagaagtaagcgaaggcgactgaaaggaagctgtaagtggcccacggcagaggtccccnnnnnnacaagctgtaagccagccccaactctttcgctcctgtcgagttcggttctaagccaaacggcggggtggagatgtagtagtagatctcaatcgatccccagaacagtacggcagcagacgtacaggaggcgaacatcataaagatccaactggcggtactaaattcaggtggttcgttacctaaacgctttttggcatacgggccaaacaccagccagaaccaaccgaaaagcatcaccaccatataccattcaaatgcccatccccatacattggtgacgtaactgaatacagcattaataacgacattcgccgcatccagatctctgactgtaagccaacaaagtatgccgacgattattaatggcggaaagaaaaccttcggttctattcccgtttttctcttttcattcttcatgagttaattccactgtgaaaacgaatatttattttgcgttcccgtttgttttatttttgttaacnnnnnatataattattattaacctcatggacgcgttaatggctaactcataatgggtattcaataagctgcattctgtgattgttatcacatttttgtttcgggtgaatagagggcgcttttctcgttaattttgattattaatcagtttgttatgttatgttatgttgcgagtaaaaaaatagcatctgactttcaatattggtgatccataaaacaatattgaaaatttctttttgctacgccgtgttttcaatattggtgaggaacttaacaatattgaaagttggatttatctgcgtgtgacattttcaatattggtgattaaagttttatttccaaattaaagggcatgatatctgtaattaacaccaccgatatgaacgacgtttccttcatgatttctggagatgcaatgaagattattacttgctataagtgcgtgcctgatgaacaggatattgcggtcaataatgctgatggttcgttagacttcagtaaagccgatgccaaaataagccaatacgatctcaacgctattgaagcggcttgccagctaaagcaacaggcagcagaggcgcaggtgacggccctaagtgtgggcggtaaagccctgaccaacgccaaagggcgtaaagatgtgctatcgcgcggtccggatgaactgattgtggtgattgatgaccagttcgagcaggcactgccgcaacaaacggcgagcgcactggctgcagccgcccagaaagcaggctttgatttgatcctctgtggcgatggttcttccgacctttatgcccagcaggttggtttgctggtaggcgaaatcctcaatattccggcagttaacggcgtcagcaaaattatctccctgacggcagataccctcaccgttgagcgcgaactggaagatgaaaccgaaaccttaagcattccactgcctgcggttgttgctgtttccactgatatcaactccccacaaattccttcgatgaaagccattctcggcgcggcgaaaaagccagtccaggtatggtcggcggcggatatcggttttaacgcagaggcagcatggtcagaacaacaggttgccgcgccgaaacagcgcgagcgtcagcgcatcgtgattgaaggcgacggcgaagaacagatcgccgcatttgctgaaaatcttcgcaaagtcatttaattacaggggatgctatgaacacgttttctcaagtctgggtattcagcgataccccttctcgtctgccggaactgatgaacggtgcgcaggctttagctaatcaaatcaatgcctttgtcctcaatgatgccgacggcgcacaggcaatccagctcggcgctaatcatgtctggaaattaaacggcaaaccggacgatcggatgatcgaagattacgctagtgtcatggctgacactattcgccagcacggtgcagacggcctggtgctgttgccaaacacccgtcgcggcaaattactggcggcaaaactgggttatcgccttaaagcggcagtgtctaacgatgccagcaccgtcagcgtacaggacggtaaagcaacagtgaaacatatggtttacggtggtctggcgattggcgaagaacgcattgccacgccgtatgcggtactgaccatcagcagcggcacgttcgatgcggctcagccagacgcgtcacgcactggcgaaacgcacaccgtggagtggcaggctccggctgtggcgattacccgcacggcaacccaggcgcgccagagcaacagcgtcgatctcgacaaagcccgcctggtggtcagcgtcggtcgcggtattggcagcaaagagaacattgcgctggcagaacagctttgcaaggcgataggtgcggagttggcctgttctcgtccggtggcagaaaacgaaaaatggatggagcacgaacgctatgtcggtatctccaacctgatgctgaaacctgaactgtacctggctgtggggatctccgggcagatccagcacatggttggcgctaacgcgtcgcaaaccattttcgccatcaataaagataaaaatgcnccgatcttccagtacgcggattacggcattgttggcgacgccgtgaagatccttccggcgctgaccgcagctttagcgcgttgatccactctggcagggctgcattttggtcctgccgctgacagggagctcttatgtccgaagatatctttgacgccatcatcgtcggtgcagggcttgccggttcggttgccgcactggtgctcgcccgcgaaggggcgcaagtgttagttatcgagcgtggcaattccgcaggtgccaagaacgtcaccggcgggcgtctctatgcccacagcctggaacacattattccaggtttcgccgaatccgccccggtagaacgcctgatcacccatgaaaaactcgcgtttatgacggaaaagtcagcgatgactatggactactgcaacggtgacgaaacctcgccatcccagcgttcttactccgttttgcgcagtaaatttgatgcctggctgatggagcaggccgaagaagcgggcgcgcagttaattaccgggatccgcgtcgataacctcgtacagcgcgatggcaaagtcgtcggtgtagaagccgatggcgatgtgattgaagcgaaaacggtgatccttgctgatggagtgaactccatccttgccgaaaagctggggatggcaaaacgcgttaaaccgacggatgtggcggttggcgtgaaggaactgatcgagttaccgaagtcggttattgaagaccgttttcagttgcagggtaatcagggggcggcttgcctatttgcgggatcacccaccgatggcctgatgggcggcggttttctttataccaatgaaaacaccctgtcgctggggctggtttgtggtctgcatcatctgcatgacgcgaaaaaatcggtgccgcaaatgctggaagatttcaaacaacatccggccgttgcaccgctgatcgcgggtggcaagctggtggaatattccgctcacgtagtgccggaagcaggcatcaacatgctgccggagctggtcggtgacggcgtattgattgccggtgatgccgccggaatgtgtatgaacctcggttttaccattcgcggtatggatctggcgattgccgccggggaagctgcagcaaaaaccgtgctttcagcgatgaaaagcgacgatttcagtaagcaaaaactcgcggaatatcgtcagcatcttgagagtggcccgctgcgcgatatgcgtatgtaccagaaactaccggccttccttgataacccacgcatgtttagcggctacccggaactggcggtaggcgtggcgcgtgacctgttcaccattgacggcagtgcgccggaactgatgcgcaagaaaatcntccgccacggcaagaaagtgggcttcatcaatctgatcaaggatggcatgaaaggagtgaccgttttatgacttctcccgtcaatgtggacgtcaaactgggcgtcaataaattcaatgtcgatgaagagcatccgcacattgttgtgaaagccgatgccgataaacaggcgctggagctgctggtgaaagcgtgccccgcaggtctgtacaagaagcaggatgacggcagtgtgcgcttcgattacgccggatgtctggagtgcggcacctgtcgcattctggggctggggtcggcgctggaacagtgggaatacccgcgcggcacctttggtgtggagttccgttacggctgatgttggtttgatacgtaacgccgcactgactctcattgcaaaaaacaggaataacccatgcaaccgtccagaaactttgacgatcttaaattttcctctattcaccgccgcattttgctgtggggaagcggtggtccgtttctggatggttatatactggtaatgattggcgtggcgctggagcaactgacnccggcgctaaaactggacgctgactggattggcttgctgggcgcgggaacgctcgccgggctgttcgttggcacatcgctgtttggttatatttccgataaagtcggacggcgcaaaatgttcctcattgatatcatcgccatcggcgtgatatcggtggcgacgatgtttgtttcatcccccgtcgaactgttggtgatgcgggtacttatcggcattgtcatcggtgcagactatcccatcgccacttcgatgatcactgagttctccagtacccgtcagcgggcgttttccatcagctttatcgccgccatgtggtatgtcggcgcgacctgtgccgatctggtcggctactggctttatgatgtggaaggcggctggcgctggatgctgggtagcgcggcgatcccctgtttgttgattttgattggtcgattcgaactgcctgaatctccccgctggttattacgcaaagggcgagtaaaagagtgcgaagagatgatgatcaaactgtttggcgaaccggtggctttcgatgaagagcagccgcagcaaacccgttttcgcgatctgtttaatcgccgccattttccttttgttctgtttgttgccgccatctggacctgccaggtgatcccaatgttcgccatttacacctttggcccgcaaatcgttggtttgttgggattgggtgttggcaaaaacgcggcactggggaacgtggtgattagcctgttctttatgctcggctgtattccgccgatgctgtggctaaacactgccggacggcgtccattgttgattggcagctttgccatgatgacgctggcgctggcggttttggggctgatcccggatatggggatctggctggtagtgatggcctttgcggtgtatgcctttttctctggcgggccgggtaatttgcagtggctctatcctaatgaactcttcccgacggatatccgcgcctctgccgtgggcgtgattatgtccttaagtcgtattggcaccattgtttcgacctgggcactaccgatctttatcaataattacggtatcagtaacacgatgctaatgggggcgggtatctcgctgtttggcttgttgatttccgtagcgtttgccccggagactcgagggatgtcactggcgcagaccagcaatatgacgatccgcgggcagagaatggggtaatttgttcagatttatctcttttctgaatcaatattattgactataagccgcgtgaatatatgactacactttgtgggaaaacaaaggcgtaaacacgcgggctacctatgattcttataatttatgcgcatccgtatccgcatcattcccatgcgaataaacggatgcttgaacaggcaaggacgctggaaggcgtcgaaattcgctctctttatcaactctatcctgacttcaatatcgatattgccgccgagcaggaggcgctgtctcgcgccgatctgatcgtctggcagcacccgatgcagtggtacagcattcctccgctccttaaactttggatcgataaagtcttctcgcacggctgggcttacggtcacggcggcacggcgctgcatggcaaacatttgctgtgggcggtgacgaccggcggcggggaaagccattttgaaattggtgcgcatccgggctttgatgtgctgtcgcagccgctacaggcgacggcaatctactgcgggctgaactggctgccaccgtttgccatgcactgcacctttatttgtgacgacgaaaccctcgaagggcaggcgcgtcactataagcaacgtctgctggaatggcaggaggcccatcatggatagccatacgctggttcaggcgctgatttatctcggttcggcggcgctgattgtacccattgcagtacgtcttggtctgggatcggtacttggctacctgatcgccggctgcattattggcccgtgggggctgcgactggtgaccgatgccgaatctattctgcactttgccgagattggcgtggtgctgatgctgtttattatcggcctcgaactcgatccacaaaggctgtggaagctgcgtgcggcagtgtttggcggtggcgcattgcagatggtgatttgcggcggcctgctggggctgttctgtatgttacttgggctgcgctggcaggtcgcggaattgatcggcatgacgctggcgctctcctctacggcgattgccatgcaggcgatgaatgaacgcaatctgatggtgacgcanatgggccgcagtgcctttgcggtgctgctgttccaggatatcgcggcaatcccgctggtggcgatgatcccgctactggcggcgagcagtgcctcgacgacgatgggcgcatttgctctctcggcgttaaaagtggcgggcgcgctggtgctggtggtactgctggggcgctatgtcacgcgtccggcgctgcgttttgttgcccgctctggcttgcgggaagtgtttagtgccgtggcgttattccttgtgtttggctttggtttgctgctggaagaggtcggcttgtcgatggcgatgggcgcgtttctggcgggcgtactgctggcaagctcggaataccgtcatgcgctggaaagcgatatcgaaccctttaaaggtttgctgttggggctgtttttcatcggtgttggcatgtcgatagactttggcacgctgattgaaaacccattgcgcattgtcattttgctgctcggtttcctcatcatcaaaatcgccatgctgtggctgattgcccgaccgttgcaggtgccaaataaacagcgtcgctggtttgcggtgttgttagggcagggcagtgagtttgcctttgtggtatttggcgcggcgcagatggcgaatgtgctggagccggagtgggcgaaatcgctgaccctggcggtggcgctgtcgatggcggcaacgccgattctgctggtgatcctcaatcgccttgagcaatcttctactgaagaggcgcgtgaagccgatgagatcgacgaagaacagccgcgggtaatcattgccggattcggtcgtttcgggcagatcaccggacgtttactgctctccagcggggtgaaaatggtggtgctcgatcacgatccggaccatatcgaaacgctgcgtaaatttggtatgaaagtgttttatggcgatgccacgcggatggatttactggaatctgcgggagcggcgaaagcggaagtgctgattaacgccattgacgatccgcaaaccaacctgcaactgacggagatggtgaaagaacatttcccgcatttgcagattattgcccgcgcccgcgatgtcgatcactacattcgtttgcgtcaggcaggcgttgaaaagccagagcgtgaaacctttgaaggtgcgctgaaaaccgggcgtctggcgctggaaagtttaggtctggggccgtatgaagcgcgagaacgtgccgatgtgttccgccgctttaatattcagatggtggaagagatggcaatggttgagaatgacaccaaagcccgcgcggcggtctataaacgcaccagcgcgatgttaagtgagatcatcaccgaggaccgcgaacatctgtcattaattcaacgacatggctggcagggaacagaagaaggtaaacataccggcaacatggcggatgaaccggaaacgaaaccctcatcctaataaagagtgacgtaaatcacactttacagctaactgtttgtttttgtttcattgtaatgcggcgagtccagggagagagcgtggactcgccagcagaatataaaattttcctcaacatcatcctcgcaccagtcgacgacggtttacgctttacgtatagtggcgacaattttttttatcgggaaatctcaatgatcagtctgattgcggcgttagcggtagatcgcgttatcggcatggaaaacgccatgccgtggaacctgcctgccgatctcgcctggtttaaacgcaacaccttaaataaacccgtaattatgggccgccatacctgggaatccatcggtcgtccgttgccaggacgcaaaaatattatcctcagcagtcaaccgggtacggacgatcgcgtaacgtgggtgaagtcggtggatgaagccatcgcggcgtgtggtgacgtaccagaaatcatggtgattggcggcggtcgcgtttatgagcagttcctgccgaaagcgcaaaaactgtacctgacgcatatcgacgcagaagtggaaggcgacacccattttccggattacgagccggatgactgggaatcggtattcagcgaattccacgacgctgatgcgcagaactctcacagctattgttttgagattctggagcggcggtaattttgtatattagaattccggcatcactgatacgtgcagatatccgtgtatactagacgtataaattgtacaggagcacgatatcatgactgcaaaacgtaccacacaaagtgtgaccgtcaccgtcgaccgtgagttagtcaatcgcgctcgtgatgcaggcttaaatatgagcgccacccttacggttgcgctcaatgctgaacttaaaaaacatgcagcaacacgttggcgtgaagagaacgctgaagctatcgctgcgttaaatcaattggctgatgaaaccggatgtttctctgatgagtaccggagcttctagcgatgcaatttacggtataccgcagtcgcagcaggaacgccgcgtttccctttgttatcgatgttaccagcgacattattggtgtgattaatcgccgtattgttattccattaacacctattgaacgatttagccgtattcgcccaccagaacggcttaacccaatccttttactggtagacggcaaagaatatgtgctcatgacgcatgagactgcaactgttccagttaacgcgctgggaacgaaattttgcgatgccagcgcgcaccgaacgttgattaaaggagcattagattttatgctcgacgggatttaagacgcgaccgcctctccctcacccaaatccttatgccggttcgacggctggacaaaatactgtttatcttcccagcgcaggcaggttaatgacccaccccagcagcagccggtatccagcgcgtaaataccttccggcgtacctttgccttccagcgatgcccagtgaccaaaggcgatgctgtattcttcagcgacaggtccaggaatcgcaaaccacggtttcagtggggcaggggcctcttccggcgattctttgctgtacatatccagttgaccgttcgggaagcaaaaacgcatacgggtaaaggcgttggtgataaaccgcagtcttcccagcccccgcaattccggtgaccagttatttggcatatcgccgtacatagcgtcgagaaagaagggataggagtcactcgacagcaccgcttctacatcgcgcgcgcactctttggcggtctgcagatcccactgcggcgtgatccctgcgtgggccatcaccagctttttctcttcgtcgatttgcagcagaggctggcgacgcagccagttaagcagctcgtcggcatccggcgcttccagcagcggtgtcaggcgatctttcggtttattgcggctgatcccggcaaatactgccagcagatgcagatcgtgattgcccagcaccagacgtacgctgtcgcctaaggatttcacatagcgcagaacatccagcgaacccgggccgngcgcgaccagatcgcccgtcagccagagggtatctttcccaggggtaaattctactttatgcagcaatgcgatcagttcatcgtaacaaccatgaacgtcgccaataaggtatgtcgccatattcttttaatgaatgagtgtgggaacggcgagtcggaatacgggaatgtcgatgctgaaagggacgccattttcatcgatcatttcgtagtgaccctgcatggtgcccagcggggtttcaatgattgcaccgctggtgtactggtactcttcgccaggcgcgataagtggctggacgccaaccactccttcgccctggacttcggtttcacggccattgccattggtgatcagccagtaacgccccaacaactgcactggcgctcgccccagattgcgtatggttacggtataagcaaaaacgtaacgttcattatcaggtgaagattgtgcctcaatgtagacgctttgaacctgaatacacactcggggcgaattgatcatcgttaactctcctgaaaaggcgcgttctccgccagatagttcgccatctggcaatattgcgcgacagagatattttccgctcgcatcgccgggtcgatccccattcccgttaacacctcgacgctaaacaggttgccgaggctgttacgaatggttttacgacgctggttaaaggcttcggtggtgatgcggctcaacacacgaacatctttaaccgggtgaggcatcgttgcatgaggaaccaggcgcacgacggcggaatccactttgggtggtggtgtaaaggctgacggcggaacttccagtaccgggatcacgttgcaatagtattgcgccatgacgcttaatcgaccatacgctttgctgttcggtcctgcaaccagacgattcaccacctctttttgcaacataaagtgcatgtcggcaatggcatcagtatagctaaacagatggaacatcaacggcgtggagatgttataaggcaggttgccgaaaacacgcagcggctgacccattttctcggccagttcgccaaagttaaaggtcatcgcatcctgctgataaatcgtcagtttcgggcctaagaatggatgcgtttgcagacgtgccgccagatcgcggtcaagttcgatgaccgtcagctggtccagacgttcgccgaccggctcggtcaatgccgccagaccggggccgatttcgaccattgcctggcccttttgcgggttaatggcagaaacaatgctgtcgatcacgaactgatcgttgagaaagttttgcccgaagcgtttacgggctaagtggccctggtggactcgattattcattgggtgttaacaatcattttgatggcgagattaagcgccgtaataaaactgccgacatcggcttcgccacgtcccgccagttcaagtgcggtgccgtggtccactgatgtgcgaataaagggcaggcccagcgtaatgttcacaccgcgcccgaagccctggtattttagcacgggaagaccctgatcgtggtacatcgccagcacggcgtcggcgttatcgagatatttcggctgaaacagggtatcggcaggcagcggcccgttgagtttcatcccctgcgcccgcagctcgtcgagcacaggaataatggtgtctatctcttccgtacccatatgaccgccttcgcccgcgtgcggattcagcccgcagaccagaatgcgcggttcggcaataccaaattttgtacgcaaatcgtgatgcaaaatagcaatcacttcgtgcaaaagtgcaggggtgatagcatctgcgatatcgcgcagcggtaaatgcgtcgttgccagcgccacgcgaagttcttcggtcgccagcatcatcaccacttttttcgcctgcgaacgctcttcgaaaaactcggtatgaccggtaaacggaatgcctgcgtcgttaatgacgcctttatgcacggggcctgtgatcagcgcagcaaattcaccgttcagacagccatcacacgctcgcgccagcgtctccaccacgtaatgcccattttcaatcgctaactgccccgcagtgacagattcacgtagcgcgacaggaagtagcgttaatgtgcccgtagtttgcggttgtgcaggggagttgggggaataagggcggagggtgagcggcaaaccgagcatcgctgcccggtcggtaaggagagtggcatcggcacaaacaaccagttcgaccggccactcacgctgtgcaagctggacaactaagtccgggccaatcccggcgggctcgccgggagtgatcacaacacgttgggttttaaccattagttgctcaggattttaacgtaggcgctggcacgttgttcctgcatccagcttgctgcttcttccgagaacttacggttcatcagcatgcggtatgcacgatctttctgcgcagcgtcggttttatcgacattacgggtatccagcagttcgattaaatgccagccgaatgaagagtgaaccggtgcactcatttgacctttgttcaggcgggtcagggcgtcacggaaggccggatcgaaaatatctggtgtagcccagccgagatcaccgccctggttagcagagcctggatcctgagagaactctttcgctgcggcagcaaaagtcgttttaccactcttgatatcagcagcaatctgttccagtttcacacgagcctgttcgtcagtcatgatcggcgacggtttcagcagaatatggcgagcatgaacttcggtcaccgagatatttttgctttcgccgcgcaggtcgttaactttcagtatatggaagccaacgccggaacgaatcgggccaacaatgtcgcctttcttcgcggtgcttaatgcctgggcgaagatcccgggcaactcctgaatacggccccagcccatctggccgccnttcagcgcctgctggtcggcagaatgagcaatcgccagcttaccgaaatcagcgccgttacgcgcctgatcgacaatggcgcgcgcctggctttccgcttcgttcacctgatcagaggtcgggttttccggcagcgggatcaggatgtggctcaggttcagctcagtgctggcgtcgttttggttacccacctgctgcgccagggattcgacttcctgcggcaggatggtgatgcgacgacgcacctcgttgttacgcacttcagagataatcatctctttgcggatctggttacgataggtgttgtagttcagaccatcgtaagccagacggctgcgcatctgatccagcgtcatgttgttctgtttcgcgatgttagcaatcgcctgatccagctgctcatcggagattttcactcccattttctgccccatctgcaggatgatttgatccatgatcaaacgttccatgatttggtggcgcagcgtcgcgtcatcaggaagttgctgccttgcctgagcagcgttcagttttaccgactgcattaatccatcaacgtcgctttccagcacgacgccgttattgacgacggctgcgactttatcgactacctggggggcagcgaaactggtattcgcgatcatggcgataccgagaagcagcgttttccagttcttcatactttttccatttcaattaaccgcactgcggattacgtggtaaatcaacaaatcacaaagtgttttgatacggcagaatgttcgaacgcagcatctcttgcgtacccagaccgtagttggagctcaggccgcgaagttcgatgttaaagccgattgcgttgtcatataccgcatgttgtttatcgttatcccaaccgttcagcttccgctcgtaaccgacgcgaattgcatagcagcaggagctgtattgcacacctaacatagagtcggcttgcttgttcgcattggtgtcgtagtagtaggccccaacaatggaccaacgatcggcaattggccagctggcgacagcacctacctgcgaaataccattcttatattgctcagcagtggaatagtacttaggcagcgtagcctgaatatattccgggctggcgtaacggtaattcagctgtaccagacggtcttcatcccgacggtattcaatgctggagttactggtcgctacgttatccagacgtgtatcgtactgaatcccgccacgcaatccccaacgctcggagatacgccagtaagtatcgcctgcccacaccagtgaacccgttttgtcgtcattctcccatgttatgttgtcatcgccagtgcgagactccgtgaaatagtagatttgaccaacggaaatattaaaacgttcaacggcagcatcatcatatatgcgagatgtgacaccggtcgtcacctggttagcggaggcaatacggtcaagaccgccgtaagtccggtcccggaacaggccagagtagtcagattgcagcagagacgagtcgtagttatagatgtcgctctgatcgcgatacggcacgtacaaatactgcgcgcgcggttccagcgtttgggtataacccggagccagcatttccatatcgcgttcaaagaccattttgccgtcaactttgaattgcggcattacgcggttaacggattcgtccagcttggtcgtgtttctggagttataccagtcaagattggtttgctgataatgggttgccagcaacttcgcttcggtattgatgctgccccagttattagagagcggcaaattgatggtcggttccaggtgaacacgggttgcttcaggcatgtcgtctctggtgttaacaaagtgcactgcctggccgtaaatacgcgtatcaaacggaccaacatcattctggtagtaattaacgtctaactgcggctctgccgagtagctactggtgttctgttcgctgaaaacctggaactgcttggttgaaacggtggcattgaagttttgcaccgcatagccaacgctgaatttttgcgttgcgtagccgtcagtactggaaccgtacttgttatcgaaatcattgaagtagctaggatcgctgaccttggtgtagtcgacgttgaaacgccacacctgatccatgaccccggagtggttccagtagaataaccaacgacgtgaactgtcatcgttcgggtgttcatcttcatagactttatctgaaggcagatagtccagttccatcaagccagcgcccgcctgggagaggtagcggaattcgttctcccacatgatgttgccacgacgatgcatataatgcggcgtgatggtggcatccatatttggcgcgatgttccagtaatatggcaggtagaactcaaagtagttggtggtggtgtacttggcgttcgggatcaagaaaccagagcgacgtttgtcacccaccggcaactgcaaataggggctataaaagatcggtaccggacccaccttaaagcgggcgttccagatctccgcaacttgttcttcgcggtcatgaataatttcgctacctaccacgctccaggtgtcagaacccggcagacaggaggtaaagctaccgttatccagaatggtatagcggttttcgccacgttgtttcatcaggtccgctttaccgcgaccctggcgacccaccatctggtaatcaccttcccagacgttggtatctttggtgttcagattcgcccagcctttcggccctttgaggatcacctggttatcgtcgtaatggacattaccgagcgcatcaacggtacgtaccggctccggttgtcctggtgcttgatggagctgcacttcgtcggcctgcagacggctgttaccctgcatgatatccacgctgccagtaaacacggcgtcatccgggtagtcccctttcgcgtggtcagcattgatagtcacgggtaagtcattggtatcgccctgtaccagaggacggtcatagcttggcacgcccaacatgcactgtgaggcgaggtcggctgccagtccctgttgactanaaagggcggtggcaatcatggtggccaggagagtggggatacgttttttcatacgttgattttattgttccatcatcggtaacgttgcgcgtgacaaacggtcagagactaacgtactcgtcatctctacgctagtgttaatcctgtccgaatagcgtcagtggtgttaggcacggcattgaatgacaggtatgataatgcaaattataggcgatgtcccacaattgaccgcagccggaaaacggtaaaagcacctttatattgtgggagatagccctgatatccgtgtgtcgatttggggaatatatgcagtattggggaaaaatcattggcgtggccgtggccttactgatgggcggcggcttttggggcgtagtgttaggcctgttaattggccatatgtttgataaagcccgtagccgtaaaatggagtggttcgccaaccagcgtgagcgtcaggcgctgttttttgccaccacttttgaagtgatggggcatttaaccaaatccaaaggtcgcgtcacggaggctgatattcatatcgccagccagttgatggaccgaatgaatcttcatggcgcttcccgtactgcggcgcaaaatgcgttccgggtgggaaaatcagacaattacccgctgcgcgaaaagatgcgccagtttcgcagtgtctgctttggtcgttttgacttaattcgtatgtttctggagatccagattcaggcggcgtttgctgatggttcactgcacccgaatgaacgggcggtgctgtatgtcattgctgaagaattagggatctcccgcgcccagtttgaccagtttttgcgcatgatgcagggcggtgcacagtttggcggcggttatcagcagcaatctggcggtggtaactggcagcaagcgcagcgtggcccaacgctggaagatgcctgtaatgtgctgggcgtgaagccgacggatgatgcgaccaccatcaaacgtgcctaccgtaagctgatgagtgaacaccatcccgataagctggtggcgaaaggtttgccgcctgagatgatggagatggcgaagcagaaagcgcaggaaattcagcaggcctatgagctgattaagcagcagaaagggtttaaatgaccctgtaaatgatgctgagtaactgcccacgataaaaggtggccgccctggcggtcacttctttgagaaaaggcgtttactcagaatggtggacaggctcaatatacggtttacgggagggtttctgttggttttatcgcgttgaccctgcttaaggttgagagctttacggcgagcggaattatatttttacgtcttaaaaataaaaaacacatatctgaatgagcgatttttgaaagtatatttattcagagcgcgcatcatgagtttttaactcaatgcgaggctattaccatgaaagtatcagttccaggcatgccggctacacttttaaatatgagcaataacgatatttataagatggtgagcggggacaagatggacatgaagatgaatatctttcaacgcttgtgggagacgttacgtcatctgttctggtcagataaacagactgaggcttataaacttctgttcaatttcgtgaataaaaaggctggcaacatcaacgcctcaaaatactttactggggctgtcaacgagaatgagaaagaaaagtttatccatagtctggaattattcaatgaactcaaaacatgcgcaaaaaatccggatgagatggtcgcaaagggcaatatgagctgggtcgcacagaccttcggtgatatcgagttaagtgtcactttttttattgaaaataaggagatatgtactcagacgttgcagctgcataaaggcccaggtaacttgggcgttgatcttagagaggcttaccttcccggcgttgacatgagggattgttaccttggtctcaaaacaatgaaaggtcacaataaagtcctttacttggaacctgggtggaatgctaacctggacggtgctaccctggacggtgctatcctggacggtgctaccgtggacggtgctacccacctatatgatgaggtaattattattannnnaatcacccccaaaaaaattgatactgaagaagttgctactaaacaaagtactgctgaacaaattactgacaacgcaattattgaatgagccagaataagctaaggttgaaggggctggaacgccccttcaacnttagcagtagcgtgggatgatttcacaattagaaagacctgcatgatgagctagagaagaggctagtgacgcaaggcgtcgtgtacgacgcggatcaccgagatgggcatcgccaaccagactgctaattagcccatgaataacaatcagaaaggaccataacagacccgataaaatgaaatataagagacggtcaacgggtgaagaaaaagttcaaaaattcgctgtggagcaggaagggaattaccgaatggaaagcgtagccacacgcaacaactgaaagcagtttggcagaaacaaaaaatccccggactcggggatttatgtacaagaggcagcccttaggatgagggtataaacgtacaggaaaggttaaaaatccgctggcgctttaaacgtcatactattgccatacgccggatgggtaatcgtcaacatctctgcatgtagcaacaaacgcggtgccatcgctctcgcttctggtgatgcataaaaacgatcgccgagaatcggatgccccagcgccagcatatgcacacgcaattgatgcgaacgcccggtaatcggttttaacaccactcttgccgtgttatccgccgcatactccaccacttcatattccgtctgcgcaggtttacccgtttcgtaacagactttctgtttcgggcggtttggccagtcgcaaatcagcggcagatccaccagaccttctgcgggggatggatgcccccagacgcgggtcacatactgctttttcggcacgcgctcgcggaactggcgttttaactcccgctccgcggctttggtcagcgccactacaatcacgccgctggtagccatatccagacgatgcaccgattctgcctgcggataatctcgctgaatgcgcgtcatcacgctgtctttgtgctcttccagacgacccggcacagacaacaaaccgctcggcttgttgaccaccataatatggtcatcctgatacaggataaccaaccagggttcctgcggtggattgtagttttccatccccattttcggctccgttactgatgcgttacaacgatcaaacgcagggcatccagacgccaacctgcctgatccaggctttccattacctgctgacggttgctctcaatggcggtcagttcgtcgtcacgaatgttcgggttcactgcacgcagagcttccagacgagacagctcggcagacagtttttcgtcggcttcgttacgtgctgcatcaatcaatgcacgggcagatttctcgatctgcgcttcacccagttgaaggatagcgtgaacatcctgctgcacggcgttaaccagtttgctgccggtgtgacggttaaccgcgttaagctggcggttaaaggtttcaaactctacctgcgccgccaggttgttgccgtttttatccagcagcatacgtaccggcgtcggtggcaggaagcggttgagctgcaactgcttcggagcctgggcttcaaccacataaatcagttccaccaacagcgtacctaccggcaacgctttgttttttaacagtgaaatcgtgctgctaccggtatcgccagaaagaatcagatccagaccgttgcggatcagcggatgttcccaggtaataaactgcgcatcttcacgcgccagcgccacttcacgatcaaaggtgatggtgatgccatcttccgacaggccagggaagtccggcaccagcatatgatcggacggcgtcagcacgatcatgttgtcgccgcgatcgtcctgattgataccgataatatcgaacaggttcatggcgaaggcgatcaggttggtatcgtcatcctgctcttcaatgctttctgccagtgcctgggctttttcgccaccgttggagtggatttccagcaggcggtcacgaccctgttccagctgtgctttcagcgcttcatgttgctcgcggcagtttttgatcagatcgtcaaagccttcggtttgatccggtgaagccagatagttaatcagatcgttgtatacgctatcgtaaatagtgcgtccggtcgggcaggtgtgctcaaatgcatccagaccttcgtgataccagcgcaccagcaccgactgagcggttttctccagataaggcacatggatctgaatatcgtgcgcttggccgatacgatccagacgaccaatacgctgctccagtagatccgggttgaatggcaggtcaaacatcaccatgtggctggcgaactggaagttacgtccttcagaaccgatttctgagcacagcagtacctgtgcgccggtgtcttcttcggcaaaccaggcggcagcgcggtcacgttcgataatcgacataccttcgtggaacaccgcagcgcgaataccttcacgttcgcgcagtacttgctccagttgcagcgcagtggcagctttagcgcagatcaccagcactttctgagagcgatggctggtcaggtagcccatcagccactcaacgcgcggatcgaagttccaccaggtggcgttatcaccttcaaattcctgataaatacgctccgggtagagcatatcgcgggcgcggtcttccgcacttttacgtgcgcccataatgccggagactttaatagccgtctgatactgcgtcggtagcggcagcttaatggtgtgcagctcgcgtttcgggaagcctttcacaccgttacgggtgttacggaacagcacgcggctggtgccgtggcgatccatcagcatcgaaaccagctcctgacgggcgctctgggcatcttcgctgtcgctgtttgctgcttgcaacagcggctcgatatcctgctcgccgatcatctcgccaagcatgttcagttcgtcattgctcagtttgttacctgccagcagcatggcaacggcgtccgctactggacgataatttttctgctcttcaacgaattgcgcgaaatcgtggaaacggttcgggtccagcagacgcagacgggcgaagtggctttccattcccagctgttccggggttgcggtcagcagcagaacgcccggcacgtgctctgccagttgttcaatagcctgatattcgcggctcggcgcgtcttcgctccacaccaggtgatgcgcttcatcgaccaccagcaggtcccactcggcttcacagagatgttccagacgctgtttgctacggcgggcaaaatccagcgagcaaatcaccagctgttcggtgtcgaacgggttgtaagcatcgtgctgagcttcggcataacgctcatcatcaaacagcgcaaagcgcaggttgaaacggcgcagcatttctaccagccactgatgctgtaaggtttccgggacgataatcagcacacgttcagcagcgccagagagcagttgctgatgaaggatcatcccggcttcaatggttttccctaaacccacttcgtcagccagcaggacgcncggcgcgtggcggcggccaacatcatgagcgatgttgagctggtgcgggatcaggctggtacgctgaccgcgcaggccgctgtacggcatacggaactgttcgctggaatacttacgcnnnnnataacgcagcgcaaagcggtccatacggtcaatctgcccggcaaacaggcggtcctgcggtttgctgaacaccagtttgctatcaaggaaaacttcacgcagggctacgccggactcttcagtatccaggcgagtaccgatataggtcagcaagccattttcttcttttacttcttcgacttgcatctgccagccgtcatggctggtaatggtatcaccagggttgaacatcacgcgggtcacgggggaatcactgcgtgcgtacagacggttttcaccagtagatgggaaaagtaaagtgacagttcgcgcatccaccgcgacaacggttccaagtcccaattcgctttctgtatcgctgatccagcgttgaccaagtgtaaaaggcatatgtgttcggctctatatctttaattgcaggcaataaccacccgctaccgtgcttatgaggtagtggtgttattcaggtccaggaatggaaagggcgctatggtactggatggcaaagcattcgtcacgcatcaaaatggtatctggcgaactctttttttgctcaaaatagcccaagttgcccggtcataagtgtagcaaaattatcctcaataaaagggagtattccctccgccacgggttgtagctggcgggtcagatagtgttcgtaatccagtggtgaacgttggtagtccagcggctccgggccgttggtggtccatacgtacttaatggtgccgcggttctgatattgcaaggggcgaccgcgcttttggttttcttcatcggcaagacgagcggcgcgtacatgaggcggaacattacgctgatattcgctcagcggacggcgaaggcgtttacggtaaaccagccgcgcatccagttcacccgccatcagtttgtcgatggtttcgcggacgtactcctgatatggctcgttgcggaagatacgcaggtaaagctcctgctgaaactgctgggccagcggcgtccagtccgtacgcacggtttccagccctttaaacaccatccgctgtttgtcgccctcctgaatcagcccggcataacgctttttactgccggtatcggctccgcgaatggttggcatcagaaaacggcagaaatgggtttcatactccagttccagtgcgctggtcagctgttgtttttgcagcgtttccgcccaccagacgttaacgtgctgcaccagtgcacgaccgattttcgtcgcttcttcttccgaatgtgcgcctttcagccagacaaacgttgagtcggtatcgccgtagatcacgtcgtagccctgcgcttcaatcaacgctttggtttgccgcatgatctgatgaccacgcatggtgatcgacgataccagccgcggatcgaagaagcggcaggcggtggtgccgagcacgccataaaaggcattcatgatgattttcagcgcctgcgacagcggtttgttaccctggcgtttggcttcatcgcgtccgtgccagatgttagtcacaatctccggcaggcaatgtttttctcgcgagaaccaggcatcgagaaagccttcggtgctgtgctctggatcaggctgcgccatgccttccaccagcccgacgggatcaatcagaaaggtgcggatgatcgacgggtacaggcttttgtagtccagcaccagcaccgaatcataaagcccaggtcgcgaatccatcacgtagccgccagggctggcgtgcggcggcacttcgccgagattaggcgcgacataaccagcgcgatgcatacggggaaaatagagatgaccaaacgctgccaccgacccgccgtgtcgatccaccggcaggccgttcaccgttgctcgttcgagcaaaaacggcatgatttcagttttatggaagatctgcgtcaccagctcgcaatctttcaggttataagttgccagcgcaggtttatcttcggcgaaacggcggtcaatttcgtccattcgatcccacgggttatcgatagattttccttcgcctaatagctcctgagcgacagtttccagcgagaatgaagagaaattccagaacgcggatttcagcgcctcgataccgtcgataattagccgacctttagcctgggcaaaaaagacgccgtttttaaagccgtgctcgcgccactccagctcactgttatcgcgccccagccgcagcggaatacgataacgctcggcatgtttttgcagcattcgcagatcaaactgcaccacgttccaaccgatgatcacatcaggatcgtagtttgcaaaccaggcgttgagtttttccagtagctgcgggcggctggcgacgtactccagttcaaaatcgagcgcggaggcgtcgccattctctggtcccagcatataaacgatgcgctgcccgcagccctccaggccgatgcagtacagctctccgtggcgggtggtttcaatatcaatagaaacccacttgagcggcggacgatagtcgggatgcggtttcagacgggcattaacgatagcgccattgtgcatatcaccctcgacccacaccggtgaggtgataaaccgctccatcagatagcgttctggcgggcgcacattggcctcgtagacggtaacgccaccttcacgcaggcgcttttcgtaattcatcaactggcgatgggcgcgacagtaaaggccatacaccggctggcggtgaaaatcctttaacgccagcggcgtcaggcgaaagccttgttcaccccgcaaaatatgctgagcgcggggaacctgatcggcgggaataaacgccacggactcttgcggtgcaagcgtaacctgcaacggcccgttgtccgtcgccagccagaaggagacctctgttccttgcggggtatcccgccagtgtcgggttaagataaaacctgcctgcgccacgctgaaaatccatcaaaaaaccaggcttgattatagcctggtttcatttgattggctgtggttttatacagtcattactgcccgtaatatgccttcgcgccatgcttacgcagatagtgtttatccagcagcgtttgctgcatatccggtaactgcggcgctaactgacggcagaatatccccatataagcgacctcttccagcacgatggcgttatgcaccgcatcttcggcatttttgccccatgcaaatgggccgtgagaatggaccagaacgccgggcatttgcgctgcatcgataccctgtttttcgaaggtttctacgatgacgttaccggtttcccactcatattcgccgttgatttctgcgtcggtcattttgcgggtgcagggaatggtgccgtagaaatagtcggcgtgggtggtgccggttgctggaatcgactgacccgcctgcgcccagatggtggcgtggcgcgagtgcgtgtgcacaatgccgccaatggacgggaatgcctgatagagtagtcggtgagttggcgtatcggaggagggctttttcgcaccttcaaccacttcaccggtttcgatgctgaccacgaccatatcgtcagcggtcatgatgctgtaatcgacgccggaaggtttgatcacaaagacgccgcgctcgcgatcaacggcgctgacgttgccccatgtgagcgtgaccaggttgtgttttggcagcgccaggttggcttctaatacctgacgtttgagatcttctaacatgttgactccttcgtgccggatgcgcgttgcttatccggcctacaaaatcgcagcgtgtaggccagataagacgcgtcagcgtcgcatcaggcgctgaatgccggatgcgcgttgcttatccggcctacaaaattgcagcgtgtaggcctgataagacgcgccagcgtcgcatcaggcgttacataccggatgcggctacttagcggcgaaacccgtaatacacttcgttccagcgcagcgcgtctntaaacgctggcaggcgggtgtcgttatcaatcaccgtgatttcaatgtcgtgcatctcggcgaactggcgcatatcgttgaggttcagcgcatggctgaagacggtatggtgcgcgccaccagcgaggatccacgcttcggaagcagttggcagatccggttgcgctttccacagcgcattcgccaccggcagtttcggcagggagtgcggtgttttcaccgtgtcgatgcagttaaccagtagacggtaacgatcgccgagatcaatcaagctggcgacaatcgctggaccggtttgggtattgaagatcaggcgggcaggatcgtccttaccaccaataccgagatgctgaacgtcgaggatcggtttctcttctgcggcgatcgacgggcagacttccagcatatgggagccgagcaccaggtcattgcctttctcgaagtgataggtgtagtcctccataaaggaggtgccgccctgcagaccggttgacatcaccttcatgatgcgaagcagggcggcagttttccagtcgccttcgcccgcaaagccgtaaccctgctgcatcagacgctgtacggccagaccaggaagctgtttcagaccgtgcaaatcttcaaaggtggtggtgaacgcgtggaagccaccttgttccaggaaacgtttcatccccagctcaatacgcgccgcttccagcacgttctgtcgtttttcgccgtggatttgtgtggcaggcgtcatggtgtagcagctttcgtactcatcgaccagcgcgttaacatcgccgtcgctgatggagttcaccacctgcaccagatcgccaaccgcccaggtattgacggagaaaccgaacttgatctgtgcggcaactttatcgccatcggtgaccgccacttcacgcatgttatcgccaaatcggcagactttcagatgacgagtatcctgtttagataccgcctgacgcatccaggagccgatacgctcatgggcttgtttatcctgccagtgaccggtaaccacggcatgttgctgacgcatacgcgcgccaatgaagccgaactcgcgaccgccgtgcgcggtctggttcaggttcataaagtccatatcgatgctgtcccacggcagcgccgcgttgaactgggtgtggaattgcagcaacggtttgttgagcatggtcaggccgttgatccacattttggccggggagaaggtgtgtagccacaccaccagaccagcgcaacgatcgtcgtaattagcatcacggcaaatagcggtgatttcatccggcgtggtgcccagcggtttcagtaccagtttgcagggcagtttcgcttccgtattcagcgctttcacaacgtgctcggcatgttgggtgacctgacgcagggtttccgggccatacagatgctggctgccaattacaaaccacacttcataattatcaaaaatcgtcattatcgtgtccttatagagtcggaacggcctgggcagcctgtgccggggcggaagttggaagatagtgttgttcggcgctcatcgcccattgctgatagcggcgataaagctgttcaaagcgttgtgcctgttcgctgcgcggttgcagggttttctctaccgcactggccattttttgctgggctgatgggatgtctgcgtgcactttcgcggcgnnnncagcaaaaatcgccgcaccgagcgcacagcattggtcagaggcaacaatttgcagcgggcgattcagcacgtcgcagcaggcctgcataatgacctggtttttccgcgcgatgccgcccagcgccatcacgttattgacggcgatcccctgatcggtaaagcactccatgattgcgcgtgcgccaaaggcggtggcagcaatcaaaccgccgaacagcagcggagcgtcggtagcgaggttaagatcggtaatcacccctttcaggcgttggttagcgttcggtgtgcggnggccgttaaaccagtcgagcaccaccggcaggtgatccagagacggatttttggcccatgcttcggtcagcgccggaagcagttgtttctggctggcgtcgatttgctcttttagttccggatgctgggcggcaagctgttccagcggccagccgagtacgcgaccgaaccaggcgtagatatcaccaaacgccgattggcctgcttccagaccgataaatccaggcaccacgctgccatcaacctgaccgcaaatacctttcactgcccgctcgccaacgctctgtttgtcggcaatcagaatgtcgcaggtggaagtaccgataacttttaccagtgcgttaggctgtgcgcctgcaccaactgcgcccatatggcagtcaaacgcgccgccggaaatcaccacgctttcaggcaggccgagacgctgcgcccattccgggcataaggtgcccaccggaatatcggcagtccaggtatcagtgaacagcggggaaggcaaatggcgattgaggatcggatccagctcatcaaagaaactggctggcggcaggccgccccagctttcgtgccatagcgacttatgcccggcgctgcaacgtccgcgacgaatatcctgcgggcgcgtggtaccggaaagcagagctggcacccagtcgcacagctcaatccacgatgcggcagattgcgccacggcgctgtcctggcgagtcacatgcaggatttttgcccagaaccattcgctggaataaataccgccaatatagcgggagtagtcaacattgcccggcgcgtggcacaaacgggtaatctcttccgcttcttcaaccgcagtgtggtctttccacaatacgaacatcgcgttcgggttttcggcaaactccgggcgcagcgccagcacgttaccgtcggcatcaatcggtgcgggcgtcgagccggtactgtcaacgccaatcccgaccacagctgcncgctgttcgacgctaagttctgcaagcacggttttcagtgccgcttccattgactcaatgtagtcacgcggatgatgacggaactggttattcggggcatcacaaaattgccctttttgccaacggggataccactctacgctggtggcgatttcttcaccggtggtgcagtccaccgccaaagctcgcacagaatcactgccaaaatcgaggccaattgcaatcgccatcgtttcactccatccaaaaaaacgggtatggagaaacagtagagagttgcgataaaaagcgtcaggtaggatccgctaatcttatggataaaaatgctatggcatagcaaagtgtgacgccgtgcaaattatcaatgtggacttttctgccgtgattatagacacttttgttacgcgtttttgtcatggctttggtcccgctttgttacagaatgcttttaataagcggggttaccggttgggttagcgagaagagccagtaaaagacgcagtgacggcaatatctgatgcaatatggacaattggtttcttctctgaatggcgggagtatgaaaagtatggctgaagcgcaaaatgatcccctgctgccgggatactcgtttaacgcccatctggtggcgggtttaacgccgattgaggccaatggttatctcgatttttttatcgaccgaccgctgggaatgaaaggttatattctcaatctcaccattcgcggtcagggggtggtgaaaaatcagggacgagaatttgtctgccgaccgggtgatattttgctgttcccgccaggagagattcatcactacggtcgtcatccggaggctcgcgaatggtatcaccagtgggtttactttcgtccgcgcgcctactggcatgaatggcttaactggccgtcaatatttgccaatacgggtttctttcgcccggatgaagcgcaccagccgcatttcagcgacctgtttgggcaaatcattaacgccgggcaaggggaagggcgctattcggagctgctggcgataaatctgcttgagcaattgttactgcggcgcatggaagcgattaacgagtcgctccatccaccgatggataatcgggtacgcgaggcttgtcagtacatcagcgatcacctggcagacagcaattttgatatcgccagcgtcgcacagcatgtttgcctgtcgccgtcgcgtctgtcacatcttttccgccagcagttagggattagcgtcttaagctggcgcgaggaccaacgcatcagccaggcgaagctgcttttgagcactacccggatgcctatcgccaccgtcggtcgcaatgttggttttgacgatcaactctatttctcgcgagtatttaaaaaatgcaccggggccagcccgagcgagttccgtgccggttgtgaagaaaaagtgaatgatgtagccgtcaagttgtcataattggtaacgaatcagacaattgacggcttgacggagtagcatagggtttgcagaatccctgcttcgtccatttgacaggcacattatgcaagcattgctggaacactttattacccaatccaccgtgtattcattgatggcggtggtgttggtggcctttctggagtcgctggcgctggtcggtttgattctacccggtacggtgctgatggcggggctgggagcgctgattggcagcggcgagttaagtttctggcacgcctggctggcagggatcgtcggttgtctgctgggcgactggatctccttctggctgggctggcgttttaaaaagccattgcatcgttggtcatttctgaagaagaacaaagcattactcgataaaactgaacatgcgttgcatcaacacagcatgttcaccattctggtcggtcgttttgttggcccgacgcgtccgctggtgccaatggtggcgggaatgctggatctcccggtggcaaaatttatcacgccgaatattatcggctgcctgctgtggccaccgttttacttcctgccggggattctggcgggtgcggcgatcgatattccagccggaatgcagagcggtgagtttaaatggttgctgctggcgacggcggtatttttgtgggttggtggctggctgtgctggcggttatggcgcagcggcaaagcaaccgatcgtttgagtcattatttgtcccgcggtcgtttgttgtggctgacgccgttgatttctgccatcggcgtggtggcgctggtggtgttagttcgccatccgttaatgccggtgtatatcgatattttgcgtaaagtggttggagtttagggcatagtcttgtgtggggcgcttgatgcggacaaaacgcacccgtaggtcggataaggcgttcacgccgcatccgacagtgcatattaacctgtaattcccaacagcgccgaagcactcgccttaccgctcaacaactcattggtcataccctgccaggcgattcgcccgtcggcgactactaccgagcgcgtggcaatccgcgccgcatcttccacactgtgcgacaccatcaatagcgtcattttttgctgctggcagctagtgctcaccagcgtcaacatctcctgacgtagcgccggatcgagcgcagagaacggttcatcgagcaataaaatcggctgttcgcgtaccagacaacgcgctaacgccacgcgctgtcgctgaccgccggaaagctcgcccggtaaccgcgccattaaattatcaatccccatctgacgggcaatcgcgtgcattttctcctgctgtaccgcgttcagcttcaatcctggattaagccccagcccgatgttctgcgcgaccgtcaggtggctgaacaggttgttctcctgaaacagcatcgacaccggacggcgtgacggcggcgtcgtggtgtgatcaacgccgtcgatagtcagcgcaccgctggctggtgtcagaaaaccggcgatcaagttcagcagggtacttttacccgcgccgcttggcccgaggatcgccacctgctcgccgcgttctaccgttaagctaaaacgcatcggcaaatggtgataaagccaggtgatatcagtcagttttaacatttcgccccggtattttttcaatcacggtaaacagcagaaaacagagcagcagcagaattaacgcggtgaccgcgccgtcctggctgcgataggagccaatttgctggtagagataaaacggcagggtgcggaaatcatcgttaccgaacaacgccaccacgccaaaatcaccaatcgacagcacgcaggcaaaggccagcgcctgcgccagcgggcgtttcagggcgcgcagctccactacttttaagcgtgaccagccttcaatccccagcgactgacataacatgctgtagcgggcggtgatatcgcgcatcgggttttccagcactttcagggcgtaggggatcgccattaacgcattggtgaaaatcacaatgccgtcagcagattgtggcaggccgatagtgttgttgagcagtaaaaagaagcccgttgccagcacaatccccggcatagcgaggatcaacatgccgctcatctccagcgcctggcccgccagcattttttgccgcgcccgcagttcgcgactgctccatagcagcatcatggtcagcactacgcacaatacacctgccgccagcgcaatacgcaacgaggtccacagcgcctgccacagcaccggttgtgccagcacttccggcaactggcgatttaccccatcgacgatcaccgccagcaacggtggcagcaacagcagcagcgccagcacaattaacatcgtgtcgcaaatgcggctatgcagacgatcgtccgggtcgcgccagccttgcagcagcgtggtgccgggcgcaatggccttactcagtcgctgactcaacagcaccagcccaaggcaacacaccatctggatcagcgccagcatcgccgcgcgggcaggatcgtagtcgtaactcagcgcctgatagattgccagctcgatagtggttgcctgcggaccgccgcccagcgataacacggtggcgaagctggcgaaacagagcataaagataagcgcggtaaccggcgggatttgtcgccgtaaccacggccattcgacgaagcggaaaaaatgccagccgcgcatcccaagctgggcggcaagctgacgttgttcgccgggaatgttttccagtgcctggagtaataagcggctcgccatcggcagattaaaaaacacatgggccagcaaaatgccttgcaggccgtagggcgaaaaggtccactccagaccgagcgattggcagagcgatgccagccagccctggcgaccatagacgctaagaatgccgaaaacagcaaccagcaccgggaggatcaaggtcattgcgcacagacgcaacagcgccagccgacccggaaagcgcctgcgatagagcgcgcgggcgaggaatatcgcgggtacgacagagagtagcgccgagagaaacgcctgccagaaggagaagcgcaccacatgccacaggtagctgtcctgccagactgccgaccagtcaccctgcggcgcgttccaccacagggcgagaaacgccgccagcgcaaccgctaccaccagcgtggcggcgcttacacctggaattaaccagccgggaattaacggctgacggcgcgttgccattcgctaatccatgcctgacgttgtgccgccacttcggctggcgtgaactccagcgtggttgcgggtttggtcaatttttcaaaaccggcaggcagcgtgacgtttgccaccggatacatccagttgccggttgggatcgcattctggaaagccggagaaaccataaactggaggaatttttgcgccagctccggctgcttgctggcagcggtgcgagcggcgacttccacttgcagatagtgaccttcgctgaagttcgcggcggcgtagttatctttcttctcttcgagaatgtgataagccggagaggtggtgtaactcagtaccagatcgctttcaccttttaaaaacaggccgtaggcttcgctccagcctttggtgaccgtgaccgttttcttcgccagtttctgccaggcttgtggggcgtcatcgccatagactttttgcatccatagcaacagacccagccccggtgtactggtgcgcggatcctgataaatcacccgccagttttgatcgctctcaaccagttctttcaggctttgtggcgggtttttcagtttgttcttgtcataaacgaaggcgaagtagccataatcaaacggtacgaaaatgtcattattccagccgccgggaacgttaacggcatccgctgccacaccgcttttggcaaacagtccggttttactggcggcgtctaacagattgttatccagccccagcaccacatcggctttactgtttttgccttccatccgtagacggttgagaagcgaaacgccatcttccagcgccaccagtttcagttcgcaattacagtcggcttcaaaggcttttttaaccaccggaccaggcccccagtcggcggcgaaggaatcgtaggtataaacagtcagaacgggtttagcgaaaacgggcgctgtgcacagcaacagcaggggaagacatttttttaacactttgcacctcaaaaaagagtggcaaaggacttgagaaggagcctcaaatcccttcgccggcgttatccggatcaggttcgacgggtattttctcagcgcacgcgtccgcgtggcaccccgttgagaacggcgttagtgtagtgattttgttatcaaccagcaatccatagagaaggcgtattaaaaaagccaatattcgttcagctatcaagagcgtatttgcatagctggagagcgttgatccgaaagaatcccttcgctacagtcaaaataggtaacgtaaccgtttattgcgtgaatgagcgatttttgacagtattcttattcaggacgcttattctgagttttttactcagagtggagctatcagcatgaaagtaagaaacccagaacagattagtatccctgctagtaataccactaaagatccaggccttactaattctcagattatcaggatggctaacttggtcaaaaagaccgagaatatgaatatctttgaagagctatgggagacgttacgcaatctcttccagtcagataaacattcccagactgcggcaaggcaaattctgaaggatgcattttatttccagaatagtgatgactactcaaaatactttaccggggctgtcgacgggaaggcgcgtgataagttaactcactggctgataaaatttaatgaactcaaagaatacgcaaaagatccggaaaatatggccgcgaaggcctcactctcgccagaaggtacgttatgcgtcagtttttttattggcgatgaggcgatatttactctggagttgcagctgaaaaagagcaccaggaccggggggattgatctgagtaatgcttactttaacggggttgtcatttgtggtattgactgtctcgaggttgacctgagcaatgctgaaacgaacaatagccgttggtatgactgacctgcgcgaggttaacctgaaaaagctgacctttccggccagaacaaggctagactgcgccgttattgattaactcagaatatgaaagaggggctggaatgccccttctttaatcttatttgcgacgctaatcagacgatgcataaaacagagaaaatataaaagtaatgtattttatcattccgtctgaatataaaaaatgcgctcatgaccgccaaaaggcgcaagctactctggatccggcggcgcaaaccacgctgatttaaaatcaaaccagccgagggtgttcatgcgcaggccgcgcatactgcgttgtccctgaatgatcagccagtggtggataagtggcaccattgctttgctggcgaccagttgttggcaccagttcgccaggttcatttcgccattgcgccagcgggcggcgtcggcttgccagtcgattggaatacagtgttggagcagcggtacctcgcacaggtgcgcgaacagcgaaaaatccagcggcagcgtaaagttggcgctgttaagccagatatcgctctcgatctctccttcatgccactgatcgtagctgatctctttgatttccagtgtgacctggtggcttgccagaatctgctgcatgatcccggcaatcacccgatgctcactgtgatcctgataaaaggtcagggtgaggctttccagaccagccggtttttcgctcgttatggtgcgggcatgatgccaacgggggagcagtccataagccgggaaccacagttgctggtactgttcctcagcgaaatagaccagattagttggagaaagcacatagcttacccagtccctgacttgctgattcgccccgcgatgggtgcggctatcgaacagtaaatagtagcaaccttcctccaggcggctttcaatctctttttcctcgccctgtggaccttttagcatcagccctccggctggctcgtcggcaatttccggcagaacccagacgttaacttcatcgattaatgcccggtaaccgaagaagtcatcgaatgcctgaattttcagttgattggtgctgttgcgaatcaccgcatacggaccggtgccgatgggatggctggcaaagttactgagggtttcccattcgcgcggcaggatcatcgccggaacttgtcccagcagtaacggcaaccagcgatccggctgcgtgaggtggatatccagcgtccagggcgtcggcgacacaatgtcagcaatatgcgaatagagcggcagcgtattgattcgttttaaagaggcgatcacgtcgtccatttccagttcacgaccatgatgaaaatggactcctggacgcaaaaagaaacgccagtgaagcggtgatatttgctgccagtggtgggcgatgtctgcttccagttccccattttcctcatttatgcgcgttagcgaactgaagatttgccgggcgatatgggtttcggaacggcgcaatgcgctgccaggtagcagattacgcaacggacgatagtagagcacgcgcaggatgtgccgcccctggcggaagctgcggcccagatgagaaaccagcatttgcctcacagtcgctttgtcgccaactaactgcactagttggtcgatacggtcctgctccagcaggtcttccgcccgctgttgctgaagcgccagcccggtatagaggaatgtcagacgcgagcgtttaccacgcccgacttccgcttcccacgtcagccagccgcgatcctgcatggtgttgagcagggtacgcatatgacgacgcgagcagctcaataacgctgccagttcgttgagcgttgtgtcctgcgatttaccctcgcagcattgccacaggcggatgaactgttgttgcagacgagcagatggcataaaaggggaactcctgcgcaaaagacagcaattttattttccctatattaagtcaataattcctaacgatgaagcaaggaggtgccccattcgtcagttttatcagcactattttaccgcgacagcgaagttgtgctggttgcgttggttaagcgtcccacaacgattaaccatgcttgaagaactgatgcagtgggaggggagtcattctgactactgatttgcggacatcatgtgtgactgagtattggtgttaatcgccacgccagcagtgattatctgctggcttttttctttttggcgattgagtatcggacggtgtacaaactaacgcataaacgcgggttgcttcgcttcataagccgcaatggcgtcgtcgtgctgcaaggtaagcccaatgctgtccagaccgttcatcatgcagtggcggcggaaggcatcaatggtaaagcgataggttttctcacccgctttcacctcttgcgcttccaggtctacatcaaaatgaatccccggattggctttcaccagcgcaaacagctcatccacttctgcgtcgcttaatttcaccggcagcagctggttgttaaagctattgccgtagaagatgtcagcaaaactcggcgcaatcaccaccttaaaaccgtagtcggtcaatgcccagggcgcgtgctcacgcgaggagccacagccgaagttttctcgtgccagcaaaatggaagcgccctgatactgcgagaagttcagcacgaagtccgggtttggctgttggcctttttcatccagaaaacgccagtcgttaaacagatgcgcgccaaaaccagtacgggtcactttctgcaaaaactgtttcgggatgattgcatcggtatcgacattggcggcatccagcggaaccaccaggcctgtgtgtttgataaatttctctgccatggtgtgctccttatttaatgttgcgaatgtcggcgaaatggccggtcacagccgcggcggcagccattgccgggctgaccagatgcgtgcgcccgccgcgcccctgacggccttcaaagttacggttgctggtggaggcacaacgttcgcccggattcagacggtcgttgttcatcgccagacacattgagcagccaggtaagcgccattcaaaaccggcttcaataaagattttatccagaccttccgcttccgcctgcgcttttaccggaccagagccgggaaccaccagcgcctgtacgcctggcgcgactttccgccctttggcgatttccgccgccgcgcgtaaatcttcaatacgtgagttggtgcaggaaccgataaacactttgtcgatagccacttcggtcagcagaatacccggtttcagccccatataggccaacgctttttctgccgacgcgcgttcaaccggatcggcaaacgaagccggatcgggaatattgtcgttcacggaaatcacctggcctgggttagttccccaggtgacctgcggtgaaatctcttctgcctgcaaagtgacaacggtatcgaaagttgcgccttcgtcggtttgcagggttttccagtaggcaacggcgtcgtcgaaatctttgcctttcggcgcatgcagacggcctttgacatagttaaaggtggtttcgtcaggtgcaaccagaccggctttcgcgcccatttcgattgccatattgcacagggtcatccgaccttccatgcttaaatcacggattgcttcgccgcaaaactccaccacatgcccggtgccgcctgcgctaccggttttaccgataattgccaacacgatatcttttgcggtaatgcccggcgcggctttgccctggacttcaattttcatggtcttcgcacggccctgtttcagggtttgcgttgccagtacgtgttcaacttcggaagtgccgataccaaaggccagtgcgccaaacgcgccgtgggtggcggtatgcgagtcgccgcagacaatggtcatccccggcaaggtcacgccctgttccggccccattacgtggacgatcccttgataggggtgattcaggtcatacagttcgacgccaaattctttgcagtttttgatcagctcctgcatctggatgcgcgccatttcaccgcaggcattaatgtctttagtctgggtagagacgttgtgatccatggtggcgaaggttttgcccggctgacgtaccgggcgaccgtgggcgcgcagaccatcgaacgcctgcggtgaggtcacttcatgcaccaggtggcggtcgatatataacagcggggtttcgttttcggcttcgtacactacgtgagcgtcgaataatttttcgtataacgtcttagccatgattacaccccttctgccacatagcgggcaatgatatcgcccatttcatcggtactaacggcggcagcgccacgggctaaatccccggtgcgaatgccttcttctaatgcgcggttaatggcgcgttcaatggcggaagccgcatcatcggcatccaggctgtaacgcagcagcagtgccagcgacagaatttgcgcaatcgggttggcgatgtttttacctgcgatatctggtgccgagccgcccgccggttcatacagtccaaaaccttgctcgttcaggctggcggaaggcaacatccccatcgagccagtgatcattgcgcactcgtcagacagaatgtcgccaaacaggttggagcacagcagaacgtcaaactgtgatggatctttaatcagctgcatggtggcgttgtcgatgtacatatgcgccagttcgatatccgggtattccgtggcgatctcgttgacgatttcacgccataaaatagaggattgcagcacgttggctttatcgatcgacgtcactttatggcgacgtttacgagcagattcaaacgcgatgcgggcaatacgctcgatctcaaaacggtgatacacctcggtatcaaacgctttttcatattgtccgctaccttcgcggccttttggctgaccgaaatagatgccgccggtcagttcgcgcacgcacaggatgtcgaagccgtttgcggcaatgtctgcacgcagcggacagaatgcttccagcccctgatacagttttgccggacgcaggttgctgaataatttgaagtgcttacgcaaaggcaacagcgcgccgcgttctggttgctggtccggtggtaaatgttcccatttcgggccgcctaccgagccaaacagcacggcatcggcttgctcacaaccttcaaccgtcgcaggcggcagtggttgcccgtggttatcaatggctgcgccgcctacatcgtaatggctggtagtgatgcgcatcgcaaagcggttgcgcacggcatccagcactttcagcgcctgggtcatcacttccggaccaatgccatcccccggcaatacggcaatatggtaattcttcgacatcacacggtttccttgttgttttcgttgtgttgagctttgcgttgcaactctttttcgacttctgtggcacgccagatattgttaagtacgtgcaccatggctttggcggaggactcgacaatatcggtggccaggccgacgccgtggaagcggcgaccgttgtagttggcgacaatatccacctgacccagcgcatctttaccgtgacctttggcggtcaggctgtatttcaccagttcgacgttatagtcagtgatgcggttaatcgcctgatagacggcatcgaccggaccgttaccgttggcggcttctgctttgacttcttcgccgcaggccagtttgacggcggcggtggcgatatcgttagagccagactgcacgctgaagtaatccagacggaaatgctccggctcttcttgctgcttaccgatgaaggccagcgcctccagatcgtaatcaaacacctgaccttttttgtccgccagcttgaggaaggcgtcgtacaaattgtctaaattatattcactttctttataccccatctcatccatgcgatgtttcaccgccgcacgccccgaacgagaggtcagattcagctggatttggttcagaccaatagattctggtgtcatgatttcgtagttttcgcggtttttcagcacgccatcctggtggataccggaggagtgtgcgaatgcgccgctgccaacaatggctttgtttgccgggatcggcatattacaaatctggctaactaactggctggtgcgccatatctcctggtgattaatggcggtgtggacgttgagaatatccttacgaactttaatcgccatgatgacttcttccagggaacagttaccggcacgctcgccgatcccgttcattgcaccttccacctggcgtgcaccggcatgtaccgccgccagtgagttgccgaccgccaggcccaaatcgtcgtgggtatgtacggaaataatggctttgtcgatgttaggcacgcgttcatacaggccgctaatgattccggcgaactcaaacggcatggtgtagcccacggtgtccggaatgttgatggtggtggcaccggcattaatcgccgcttcgaccactcgcgccagatcggcaatgggtgtacgcccggcatcttcgcaagaaaattcaacatcatcggtgtaattacgggcgcgtttcaccatatagatagcgcgttcgatcacctcgtccagcgtgctgngcagcttggtggcgatgtgcattggcgaagtggcaataaaggtatgaatacggaaggcttcggcgactttcagggattcggccgccacgtcgatatctttctccacgcagcgagctaacgcgcatacacggctgtttttaacctggcgagcgatggtttgcactgattcaaaatcacccggcgaagagacggggaacccgacttccatcacgtcaacacccatacgctcaagggccagcgcaatttgcagtttttctttcacactcaagcttgcctgtaacgcctgttcaccgtcgcgcaatgtggtatcgaaaataatgacttgctggctcatggtttgggtccttgtctcttttagagcgcctcgcttcgggcataaaaaaacccgcgcaatggcgcgggttttttgtttgactgcgtgctggcttaatgctggatgccgctcactcgtctaccgcgcaaagaagatgcgtttagtagtagtagaccgataaagcgaacgatgtgagtcattaaatcagctccagatgaatgcgatatgcttttagagttactggatacaaaaacggatgtcaaccctgacgcaataaaaacgtcccgccagcatgagttctgcatccgtaagattagctaattgtgctgctgtggttaaaacaagcgatattaatttctgcttaactaccgatgcttttcatcggttgacatatttcagaataaatttttgcatctaatccacgaggaaaaaggggacaaaatgcacgcgttgcaaaacctatcctgatgatttgtattgaattatatgttttgcggattttttgatattgatttggtgaatattattgatcaattaatgttaagaattaatgcattaaacatataaataaattattaaaaagcacatttaatccattttgtggatgattgagtattcgcggtagttatgattagattgtttacgcaacaagaacattatggattattatgctgtggtaaatgacgctttccacggcaatggattctgtttttataagaacccgtatctttatgttttcctaattttactcattttcctttttcttattttatatgcatgataaatcatattctcgaggattatttctctgcattccaataagggaaagggagttaagtgtgacagtggagttaagtatgccagaggtacaaacagatcatccagagacggcggagttcagcaagccacagctacgcatggtcgatctcaacttattaaccgttttcgatgccgtgatgcaggagcaaaacattacccgtgctgctcatgttctgggaatgtcgcaacctgcggtcagtaacgctgttgcacgcctgaaggtgatgtttaatgacgagctttttgttcgttatggccgtggtattcaaccgactgctcgcgcatttcaactttttggttcagttcgtcaggcattgcaactagtacaaaatgaattgcctggttcaggttttgaacccgcgagcagtgaacgtgtatttcatctttgtgtttgcagcccgttagacagtattctgacctcgcagatttataatcacattgagcagattgcgccaaatatacatgttatgttcaagtcttcattaaatcagaacactgaacatcagctgcgttatcaggaaacggagtttgtgattagttatgaagacttccatcgtcctgaatttaccagcgtgccattatttaaagatgaaatggtgctggtagccagcaaaaatcacccaacaattaagggcccgttactgaaacatgatgtttataacgaacaacatgcggcggtttcgctcgatcgtttcgcgtcatttagtcaaccttggtatgacacggtagataagcaagccagtatcgcgtatcagggcatggcaatgatgagcgtacttagcgtggtgtcgcaaacgcatttggtcgctattgcgccgcgttggctggctgaagagttcgctgaatccttagaattacaggtattaccgctgccgttaaaactaaatagcagaacctgttatctctcctggcatgaagctgccgggcgtgataaaggccatcagtggatggaagagcaattagtctcaatttgcaaacgctaactgaatgcagaataggtcagacatgaatgtctggtttattctgcattttttattgagtgtagaattttattctgaatgtgtgggctctctattttaggattaattaaaaaaatagagaaattgctgtaagtggtgggatttagccgatttattatcatttttatccttcgtaatggaggattttatcgtttcttttcacctttcctcctgtttattcttattacccggcgtttatgtctctggctgccaattgcttaagcaagatcggacggttaatgtgttttacacattttttccgtcaaacagtgaggcaggccatggagatgttgtctggagccgagatggtcgtccgatcgcttatcgatcagggcgttaaacaagtattcggttatcccggaggcgcagtccttgatatttacgatgcattgcataccgtgggtggtatcggtcatgttttagttcgtcatgagcaggcggcagtgcatatggccgatggtctggcgcgcgcgaccggggaagtcggcgtcgtgctggtaacgtcgggtccaggggcgaccaatgcgattaccggcatcgccaccgcttatatggattccattccattagttgtcctttccgggcaggtagcgacctcgttgataggttacgatgcctttcaggagtgcgacatggtggggatttcgcgaccggtggttaaacacagttttctggttaagcaaacggaagacattccgcaggtgctgaaaaaggctttctggctggcggcaagtggtcgcccaggaccagtggtcgttgatttaccgaaagatattcttaatccggcgaacaaattaccctatgtctggccggagtcggtcagtatgcgttcttacaatcccactactaccggacataaagggcaaattaagcgcgctctgcaaacgctggtggcggcaaaaaaaccggttgtctacgtaggcggtggggcaatcacggcgggctgccatcaacagctgaaagaaacggtggaggcgttaaatctgcccgttgtttcctcattgatggggctgggagcgtttccggcaacgcatcgtcaggcactgggcatgctgggaatgcacggtacctacgaagccaatatgacgatgcataacgcggatgtgatttttgctgtcggtgtccgctttgacgatcgcaccactaacaatctggcaaagtactgcccaaatgccactgttctgcatatcgatattgatcctacttccatttctaaaaccgtgactgcggatattccgattgtgggggatgctcgccaggtcctcgaacaaatgcttgaactcttgtcgcaagaatccgcccatcaaccgctggatgagatccgcgactggtggcagcagattgaacagtggcgcgctcgtcagtgcctgaaatatgacactcacagtgaaaagattaaaccgcaggcggtgatcgagactctttggcggttgacgaaggggggcgcttacgttacgtccgatgtcgggcagcaccagatgtttgctgcgctttattatccattcgacaaaccccgtcgttggatcaactccggtggcctcggcactatgggctttggtttacctgcggcactgggcgtcaaaatggcgctgccagaagaaaccgtggtttgcgtcactggcgacggcagtattcagatgaacattcaggaactgtctacagcgttgcaatatgaactgccggtgctggtggttaatcttaataaccgctatttggggatggtgaagcagtggcaggacatgatctattccggtcgtcattcacaatcttatatgcagtctttaccagacttcgtccgtctggcggaagcctatggtcacgtcgggatccagatctctcatccgcaagagctggaaagcaaacttagcgaggcgcttgaacaggtgcgtaataatcgcctggtatttgttgatgtcaccgtcgatggcagtgagcacgtctacccgatgcagattcgcgggggcggaatggatgaaatgtggttaagcaaaacggagagaacctgattatgcgccggatattatcagtcttactcgaaaatgaatcaggcgcgttatcccgcgtgattggccttttttcccagcgtggctacaacattgaaagcctgaccgttgcgccaaccgacgatccgacattatcgcgtatgaccatccagaccgtgggcgatgaaaaagtgcttgagcagatcgaaaagcaattacacaagctggtcgatgtcttgcgcgtgagtgagttggggcagggcgcgcatgttgagagggaaatcatgctggtgaaaattcaggccagcggttacgggcgtgacgaagttaaacgtaatacggaaatattccgtgggcaaattattgatgtcacaccctcgctttataccgttcaattagcaggcaccagcgataagcttgatgcatttttagcatcgattcgcgatgtggcgaaaattgtggaagttgctcgctctggtgtggtcggactttcgcgcggcgataaaataatgcgttgagaatgatctcaatgcgcaatttacagcccaacatgtcacgttgggctttttttgcgaaatcagtgggaacctggaataaaagcagttgccgcagttaattttctgcgcttagatgttaatgaatttaacccataccagtacaatggctatggtttttacattttacgcaaggggcaattgtgaaactggatgaaatcgctcggctggcgggagtgtcgcggaccactgcaagctatgttattaacggcaaagcgaagcaataccgtgtgagtgacaaaaccgttgaaaaagtcatggctgtggtgcgtgagcacaattaccacccgaacgccgtggcagctgggcttcgtgctggacgcacacgttctattggtcttgtgatccccgatctggagaacaccagctatacccgcatcgctaactatcttgaacgccaggcgcggcaacggggttatcaactgctgattgcctgctcagaagatcagccagacaacgaaatgcgctgcattgagcaccttttacagcgtcaggtcgatgccattattgtttcgacgtcgttgcctcctgagcatcctttttatcaacgctgggctaacgacccgttcccgattgtcgcgctggaccgcgccctcgatcgtgaacactttaccagcgtggttggtgccgatcaggatgatgccgaaatgctggcggaagagttacgtaagtttcccgccgagacggtgctttatcttggcgcgctgccggagctttctgtcagcttcctgcgtgaacaaggtttccgtactgcctggaaagatgatccgcgcgaagtgcatttcctgtatgccaacagctatgagcgggaggcggctgcccagttattcgaaaaatggctggaaacgcatccgatgccgcaggcgctgttcacaacgtcgtttgcgttgttgcaaggggtgatggatgtcacgctacgtcgcgatggtaaactgccttctgacctggcaattgccacctttggcgataacgaactgctcgacttcttacagtgcccggtgctggcagtggctcaacgtcaccgcgatgtcgcagagcgtgtgctggagattgtcctggcaagcctggacgaaccgcgtaagccaaaacctggtttaacgcgcattaaacgtaatctctatcgccgcggtgtgctcagccgtagctaagctgcgaacaaaaatacgcgccaggtgaatttcactctggcgcgtagagtacgggactggacatcaatatccttaaagtaaataagactattcctgactattattgataaatgcttttaaacccgccagttaattaactcaccagctgaaattcacaataattaagtgatatcgacagcgcgtttttgcattattttgttacatgcagagatgaattgccgatttaacaagcacttttctttgcttttgcgcaaacccgctggcatcaagcgctacacagacgcaacagggactgttaaccggggaagatatgtcctaaaatgccgctcgcgtcgcaaactgacactttatatttgctgtggaaaatagtgagtcattttaaaacggtgatgacgatgagggtttttttcttacagctattcataacgttaatttgcttcgcacgttggacgtaaaataaacaacgctgatattagccgtaaacatcgggttttttacctcggtatgccttgtgactggcttgacaagcttttcctccgctccgtaaactcctttcagtgggaaattgtggggcaaagtgggaataaggggtgaggctggcatgttccggggagcaacgttagtcaatctcgacagcaaagggcgcttatcagtgcctacccgttatcgggaacagctgcttgagaacgctgccggtcaaatggtttgcaccattgacattcatcacccgtgcctgctgctttaccccctgcctgaatgggaaattatcgagcaaaaattatcgcgtctgtcgagcatgaacccggttgagcgccgtgtgcagcgcctactgttaggtcatgccagcgaatgtcagatggatggcgcaggtcgattgttaatcgcgccagtactgcggcaacatgccgggctgacaaaagaagtgatgctggttggacagttcaacaagtttgagctgtgggatgaaacaacctggcatcaacaggtcaaggaagatatcgacgcagagcagttggctaccggagacttatcggagcgactgcaggacttgtctctataaaatgatggaaaactataaacatactacggtgctgctggatgaagccgttaatggcctcaatatccgtcctgatggcatctacattgatgggacttttggtcgcggtggtcactcacgtctgatcctctcgcagcttggcgaagaggggcgtttgctggcgatcgatcgcgacccgcaggctatcgccgttgcgaagactattgatgatccgcgcttctccatcatccacggacctttttccgcgctgggcgaatacgttgccgagcgcgatcttatcggcaagatcgacggcattctcctcgatcttggtgtctcttcaccgcaacttgatgatgctgaacgcggcttttcctttatgcgcgatggtccgctggacatgcgtatggacccaacccgtgggcagtcagccgctgaatggctacaaaccgcagaagaagccgatatcgcctgggtattgaaaacctatggtgaagagcgttttgccaaacgcattgcccgagccattgtcgagcgtaaccgcgaacagccgatgacccgcaccaaagaactggcggaagtcgtggctgctgcaacgccggtgaaagataagtttaaacatcccgcgacccgtaccttccaggcggtgcgcatttgggtaaacagtgaactggaggagatagagcaggcgctaaaaagctcgctcaacgtgctggccccgggtgggcggctttcgatcatcagcttccactcgctggaagaccgtattgtgaaacgttttatgcgtgaaaacagccgcggtccgcaagttccggcagggttaccgatgactgaagagcagctcaaaaaactgggtggccgtcagctgcgagcactaggcaaattaatgccgggcgaagaagaggtggctgagaatcctcgtgcccgtagttcagttctgcgtattgcagagaggacgaacgcatgatcagcagagtgacagaagctctaagcaaagttaaaggatcgatgggaagccacgagcgccatgcattgcctggtgttatcggtgacgatcttttgcgatttgggaagctgccactctgcctgttcatttgcattattttgacggcggtgaccgtggtaaccacggcgcaccatacccgtttactgaccgctcagcgcgaacaactggtgctggagcgagatgctttagacattgaatggcgcaacctgatccttgaagagaatgcgctcggcgaccatagccgggtggaaaggatcgccacggaaaagctgcaaatgcagcatgttgatccgtcacaagaaaatatcgtagtgcaaaaataaggataaacgcgacgcatgaaagcagcggcgaaaacgcagaaaccaaaacgtcaggaagaacatgccaactttatcagttggcgttttgcgttgttatgcggctgtattctcctggcgctggcttttctgctcggacgcgtagcgtggttacaagttatctccccggatatgctggtgaaagagggcgacatgcgttctcttcgcgttcagcaagtttccacctcccgcggcatgattactgaccgttctggtcgcccgttagcggtgagcgtgccggtaaaagcgatttgggctgacccgaaagaagtgcatgacgctggcggtatcagcgtcggtgaccgctggaaggcgctggctaacgcgctcaatattccgctggatcagctttctgcccgcattaacgccaacccgaaagggcgctttatttatctggcgcgtcaggtaaaccctgacatggcggactacatcaaaaaactgaaactgccgggaattcatctgcgtgaagaatctcgccgttattatccatccggcgaagtgactgctcacctcatcggctttactaacgtcgatagtcaaggtattgagggcgttgagaagagtttcgataaatggcttaccgggcagccgggtgagcgcattgtgcgtaaagaccgctatggtcgcgtaattgaagatatttcttctactgacagccaggctgcgcacaacctggcgctgagtattgatgaacgcctgcaggcgctggtttatcgcgaactgaacaacgcggtggcctttaacaaggctgagtccggtagcgccgtgctggtggatgtcaacaccggtgaagtgctggcgatggctaacagcccgtcatacaaccctaacaatctgagcggcacgccgaaagaggcgatgcgtaaccgtaccatcaccgacgtgtttgaaccgggttcaacggttaaaccgatggtggtgatgaccgcgttgcaacgtggcgtggtgcgggaaaactcggtactcaataccattccttatcgaattaacggccacgaaatcaaagacgtggcacgctacagcgaattaaccctgaccggagtattacagaagtcgagtaacgtcggtgtttccaagctggcgttagcgatgccgtcctcagcgttagtagatacttactcacgttttggactgggaaaagcgaccaatttggggttggtcggagaacgcagtggcttatatcctcaaaaacaacggtggtctgacatagagagggccaccttctctttcggctacgggctaatggtaactccgttacagttagcgcgagtctacgcaactatcggcagctacggcatttatcgcccactgtcgattaccaaagttgaccccccggttcccggtgaacgtatcttcccggaatctattgtccgcactgtggtgcatatgatggaaagcgtggcgctaccgggtggtggcggcgtgaaggcggcgattaaaggctatcgtattgccattaaaaccggtaccgcgaaaaaggtcgggccggacggtcgctacatcaataaatatattgcttacaccgcaggtgttgcgcctgcgagtcagccgcgcttcgcgctggttgttgttatcaacgatccgcaggcgggtaaatactacggcggcnnnnnttccgcgccggtctttggtgccatcatgggcggcgtattgcgaaccatgaacatcgagccggatgcgctgacaacgggcgataaaaatgaatttgtgattaatcaaggcgaggggacaggtggcagatcgtaatttgcgcgaccttcttgctccgtgggtgccagacgcaccttcgcgagcactgcgagagatgacactcgacagccgtgtggctgcggcgggcgatctctttgtagctgtagtaggtcatcaggcggacgggcgtcgatatatcccgcaggcgatagcgcaaggtgtggctgccattattgcagaggcgaaaggtgaggcgaccgacggtgaaatccgtgaaatgcacggcgtaccggtcatctatctcagccagctcaacgagcgtttatctgcactggcgggccgcttttaccatgaaccctctgacaatttangtntcgtgggcgtaacgggcaccaacggcaaaaccacgacgacccagctgctggcgcagtggagccaactgcttggcgaaaccagcgcggtaatgggcaccgttggtaacggtctgctggggaaagtgatcccgacagaaaataccaccggttcggcagttgatgttcagcatgagctggcggggctggtggatcaggacgcgactttttgcgcaatggaagtttcctcccacgggctggtacagcaccgtgtggcggcattgaaatttgcggcgtcggtctttactaacttaagccgcgatcaccttgattatcatggtgatatggaacactacgaagctgcgaaatggctgctttattctgaacatcattgcggtcaggcgattattaatgccgacgatgaagtaggccgccgctggctggcaaaactgccggatgcagttgcggtatcaatggaagatcatatcaatccgaactgtcacggacgctggttgaaagcgaccgaagtgaactatcacgacagcggtgcgactattcgctttagctcaagttggggcgatggcgaaattgaaagccatctgatgggcgcttttaacgtcagcaacctgctgctcgcgctggcgacgctgctggcgctgggctatccactggctgatctgctgaaaaccgctgctcgtctgcaaccggtttgcggacgtatggaagtgttcactgcgccaggcaaaccgacggtggtagtggattacgcgcatacgccggatgcactggaaaaagccttacaggcggcgcgtctgcactgtgcgggcaagctgtggtgtgtctttggctgtggtggcgatcgcgataaaggtaagcgtccactgatgggcgcaattgccgaagagtttgctgatgtggcggtggtgacggacgataatccgcgtaccgaagagccgcgtgccatcatcaacgatattctggcgggaatgttagatgccggacatgccaaagtgatggaaggccgtgctgaagcggtgacttgcgccgttatgcaggctaaagagaacgatgtggtgctggtcgcgggcaaaggccatgaagattaccagattgttggcaatcagcgtctggactactccgatcgcgtcacggtggcgcgtctgctgggggtgattgcatgattagcgtaacccttagccaacttaccgacattctcaacggtgaactgcaaggtgcagatatcacccttgatgctgtaaccactgatacccgaaaactgacgccgggctgcctgtttgttgccctgaaaggcgaacgtttcgatgctcatgattttgccgaccaggcgaaagctggcggcgcaggcgcactactggttagccgtccgctggatatcgacctgccgcagttaatcgtcaaggatacgcgtctggcgtttggtgaactggctgcatgggttcgccagcaagttccggcgcgcgtggttgctctgacaggttcctccggcaaaacctccgttaaagagatgacggcggcgattttaagccagtgcggcaacacgctttatacggcaggcaatctcaacaacgacatcggtgtaccgatgacgctgttgcgcttaacgccggaatacgattacgcagttattgaacttggcgcgaaccatcagggcgaaattgtctggactgtgagtctgactcgcccggaagctgcgctggtcaacaacctggcagcggcgcatctggaaggttttggctcgcttgcgggtgtcgcgaaagcgaaaggtgaaatctttagcggcctgccggaaaacggtatcgccattatgaacgccgacaacaacgactggctgaactggcagagcgtaattggctcacgcaaagtgtggcgtttctcacctaatgccgccaacagcgatttcaccgccaccaatatccatgtgacttcgcacggtacggaatttaccctgcaaaccccaaccggtagcgtggatgttctgctgccgttgccggggcgtcacaatattgcgaatgcgctggcagccgctgcgctctccatgtccgtgggcgcaacgcttgatgctatcaaagcggggctggcaaatctgaaagctgttccaggccgtttgttccccattcaactggcagaaaaccagttgctgctcgacgactcctacaacgccaatgtcggttcaatgaccgccgctgttcaggtactggctgaaatgccgggctaccgcgtgctggtggtgggcgatatggcggaactgggcgctgaaagcgaagcctgccatgtacaggtgggcgaggcggcaaaagctgctggtattgaccgcgtgttaagcgtgggtaaacaaagccatgctatcagcaccgccagcggcgttggcgaacattttgctgagaaaactgcgttaattacgcgtcttaaatcactgattgctgagcaacaggtaattacgattttagttaagggttcacgtagtgccgccatggaagaggtagtacgcgctttacaggagaatgggacatgttagtttggctggccgaacatttggtcaaatattattccggctttaacgtcttttcctatctgacgtttcgcgccatcgtcagcctgctgaccgcgctgttcatctcattgtggatgggcccgcgtatgattgctcatttgcaaaaactttcctttggtcaggtggtgcgtaacgacggtcctgaatcacacttcagcaagcgcggtacgccgaccatgggcgggattatgatcctgacggcgattgtgatctccgtactgctgtgggcttacccgtccaatccgtacgtctggtgcgtgttggtggtgctggtaggttacggtgttattggctttgttgatgattatcgcaaagtagtgcgtaaagacaccaaagggttgatcgctcgttggaagtatttctggatgtcggtcattgcgctgggtgtcgccttcgcgctgtaccttgttggcaaagacacgcccgcaacgcagctggtggtcccattctttaaagatgtgatgccgcaactggggctgttctacattctgctggcttacttcgtcattgtgggtactggcaacgcggtaaacctgaccgatggtcttgacggtctggcaattatgccgaccgtatttgtcgccggtggttttgcgctggtggcgtgggcgaccggcaacatgaactttgccagctatttacacataccatatctgcgacacgccggggaactggttattgtctgtaccgcgatagtcggggcagggctgggcttcctgtggtttaacacctatccggcgcaggtctttatgggcgatgtaggttcgctggcgttaggtggtgcgttaggcattatcgccgtactgctgcgtcaggaattcctgctggtgattatggggggcgtgttcgtggtagaaacgctttccgtcatcctgcaggtcggctcctttaaactgcgcggacaacgtattttccgcatggcaccgattcatcaccactatgaactgaaaggctggccggaaccgcgcgtcattgtgcgtttctggattatttcgctgatgctggtcctgattggtctggcaacgctgaaggtacgttaatcatggctgattaccagggtaaaaatgttgtcattatcggcctgggcctcaccgggctttcctgcgtggactttttcctcgctcgcggtgtgacgccgcgcgttatggatacgcgtatgacaccgcctggcctggataaattacccgaagccgtagaacgccacacgggcagtctgaatgatgaatggctgatggcggcagatctgattgtcgccagtcccggtattgcactggcgcatccatccttaagcgctgccgctgatgccggaatcgaaatcgttggcgatatcgagctgttctgtcgcgaagcacaagcaccgattgtggcgattaccggttctaacggcaaaagcacggtcaccacgctagtgggtgaaatggcgaaagcggcgggggttaacgttggtgtgggtggcaatattggcctgcccgcgttgatgctgctggatgatgagtgcgaactgtacgtactggaactgtcgagcttccagctggaaaccacctccagcttacaggcggtagcagcgaccattctgaacgtgactgaagatcatatggatcgctatccgtttggtttacagcaataccgtgcggcaaaattgngtatttacgaaaatgcgaaagtttgtgtcgtcaatgctgatgatgccttaacaatgccgattcgcggtgcggatgaacgctgcgtcagctttggcgtcaacatgggtgactatcacctgaatcatcagcagggcgaaacctggctgcgggtgaaaggcgagaaagtgctgaacgtgaaagaaatgaaactttccgggcagcataactacaccaatgcgctggcggcgctggcgctggcagatgccgcagggttaccgcgtgccagcagcctgaaagcgttaaccacattcactggtctgccgcatcgctttgaagttgtgctggagcataacggcgtacgttggattaacgattcgaaagcgaccaacgtcggcagtacggaagcggcgctgaatggcctgcacgtagacggcacgctgcatttgttgctgggcggcgatggtaaatcggcggactttagcccactggcgcgttacctgaatggcgataacgtacgtctgtattgtttcggtcgtgacggcgtgcagctggcggcgctacgcccggaagtggcagaacaaaccgaaactatggaacaggcgatgcgcttgctggctccgcgtgttcagccgggcgatatggttctactctccccggcctgtgccagccttgatcagttcaagaactttgaacaacgaggcaatgagtttgcccgtctggcgaaggagttaggttgatgcgtttatctctccctcgcctgaaaatgccgcgcctgccaggattcagtatcctggtctggatctccacggcgctaaagggctgggtgatgggctcgcgggaaaaagataccgacagcctgatcatgtacgatcgcaccttactgtggctgaccttcggcctcgcggcgattggctttatcatggtgacctcggcgtcaatgcccatagggcaacgcttaaccaacgatccgttcttcttcgcgaagcgtgatggtgtctatctgattttggcgtttattctggcgatcattacgctgcgtctgccgatggagttctggcaacgctacagtgccacgatgctgctcggatctatcatcctgctgatgatcgtgctggtagtggggagctcggttaaaggggcatcgcgttggatcgatctcggtttgctgcgtatccagcctgctgagctgacaaaactgtcgctgttttgctatatcgccaactatctggtgcgtaaaggtgacgaagtacgtaataacctgcgcggcttcctgaaaccgatgggcgtgattctggtgttggcagtgttactgctggcacagccagaccttggtacggtggtggtgttgtttgtgactacgctggcgatgttgttcctggcgggagcgaaattgtggcagttcattgccattatcggtatgggcatttcagcggttgtgttgctgatactcgccgaaccgtaccgtatccgccgtgttaccgcattctggaacccgtgggaagatccctttggcagcggctatcagttaacgcaatcgctgatggcgtttggtcgcggcgaactgtggggacaaggtttaggtaactctgtacaaaaactggagtatctgccggaagcgcacactgactttattttcgccattatcggcgaagaactggggtatgtcggtgtggtgctggcacttttaatggtattcttcgtcgcttttcgcgcgatgtcgattggccgtaaagcattagaaattgaccaccgtttttccggttttctcgcctgttctattggcatctggtttagcttccaggcgctggttaacgtaggcgcggcggcggggatgttaccgaccaaaggtctgacattgccgctgatcagttacggtggttcgagcttactgattatgtcgacagccatcatgatgctgttgcgtattgattatgaaacgcgtctggagaaagcgcaggcgtttgtacgaggttcacgatgagtggtcaaggaaagcgattaatggtgatggcaggcggaaccggtggacatgtattcccgggactggcggttgcgcaccatctaatggctcagggttggcaagttcgctggctggggactgccgaccgtatggaagcggacttagtgccaaaacatggcatcgaaattgatttcattcgtatctctggtctgcgtggaaaaggtataaaagcactgatagctgcgccgctgcgtatcttcaatgcctggcgtcaggcgcgggcgattatgaaagcgtacaaacctgacgtggtgctcggtatgggcggctacgtatcaggtcctggtggtctggccgcgtggtcgttaggcattccggttgtacttcatgaacaaaacggtattgcgggcttaaccaataaatggctggcgaagattgccaccaaagtgatgcaggcgtttccaggtgctttccccaatgcggaagtggtgggtaacccggtgcgtaccgatgtgttggcgctaccgttgccgcagcaacgtttggctggacgtgaaggtccggttcgtgtgctggtagtgggtggttcccagggcgcacgcattcttaaccagacaatgccgcaggttgctgcgaaactgggtgattcagtcactatctggcatcagagcggcaaaggttcgcaacaatccgttgaacaggcgtatgccgaagcggggcaaccgcagcataaagtgactgaatttattgatgatatggcggcggcgtatgcgtgggcggatgtcgtcgtttgccgctccggtgctttaacggtgagtgaaatcgccgcggcaggactaccggcgttgtttgtgccgtttcaacataaagaccgccagcaatactggaatgcgctaccgctggaaaaagcgggcgcagccaaaattatcgagcagccacagcttagcgtggatgctgtcgccaacaccctggccgggtggtcgcgagaaaccttattaaccatggcagaacgcgcccgcgctgcatccattccggatgccaccgagcgagtggcaaatgaagtgagtcgggctgcccgggcgtaattgtagcgatgccttttgcatcgtatgaatttaagaagttaatggcgtaaagaatgaatacacaacaattggcaaaactgcgttccatcgtgcccgaaatgcgtcgcgttcggcacatacattttgtcggcatcggtggtgccggtatgggcggtattgccgaagttntggccaatgaaggttatcagatcagtggttccgatttagcgccaaatccggtcacgcagcagttaatgaatctgggagcgacgatttatttcaaccatcgcccggaaaacgtacgtgatgccagcgtggtcgttgtttccagcgccatttctgccgataacccggaaattgtcgcagctcatgaagcgcgtattccggtgatccgtcgtgccgaaatgctggctgagttaatgcgttttcgtcatggcatcgccattgcaggaacgcacggcaaaacgacaactaccgcgatggtctccagcatctacgcagaagcggggctcgacccaaccttcgttaacggcgggctggtaaaagcggcgggggttcatgcgcgtttggggcatggtcggtacctgattgccgaagcagatgagagtgatgcatcgttcctgcatctgcaaccgatggtggcgattgtcaccaatatcgaagccgaccacatggatacctaccagggcgactttgagaatttaaaacagacttttattaattttctgcacaacctgccgttttacggtcgtgcggtgatgtgtgttgatgatccggtgatccgcgaattgttaccgcgagtgggacgtcagaccacaacttacggcttcagcgaagatgccgacgtgcgtgtagaagattatcagcagattggcccgcaggggcactttacgctgctgcgccaggacaaagagccgatgcgcgtcaccctgaatgcgccaggccgtcataacgcgctgaacgccgcagctgcggttgcggttgctacggaagagggcattgacgacgaggctattttgcgtgcgctggagagcttccaggggactggtcgccgttttgatttcctcggtgaattcccgctggagccagtgaatggtaaaagcggtacggcaatgctggtcgatgactacggccaccacccgacggaagtggacgccaccatnnnagnngcgcgcgcaggctggccggataaaaacctggtaatgctgtttcagccgcaccgttttacccgtacacgcgacctgtatgatgatttcgccaatgtgctgacgcaggttgataccctgttgatgctggaagtgtatccggctggcgaagcgccaattccgggtgcggacagccgttcgctgtgtcgcacaattcgtggacgtgggaaaatagatcccattctggtgccggaccctgcgcaggtagccgagatgctggcaccggtattaaccggtaacgacctgattctcgttcagggggctggtaatatcggaaaaattgcccgttctttagctgaaatcaaactgaagccgcaaactccggaggaagaacaacatgactgataaaatcgcggtcctgttgggcgggacttccgctgagcgggaagtttctctgaattctggcgcagcggtgttagccgggctgcgtgaaggcggtattgacgcatatcctgtcgacccgaaagaagttgacgtgacgcaactgaagtcgatgggctttcagaaagtgtttatcgcgctacacggccgcggcggtgaagatggtacgctgcaggggatgctcgagctgatgggcttgccttataccggcagcggagtgatggcatctgcgctttcaatggataaactacgcagcaaacttctgtggcaaggtgccggtttaccggtcgcgccgtgggtagcgttaacccgcgtagagtttgaaaaaggcctgagtgataagcagttagcagaaatttctgctctgggtttgccggttatcgttaagccgagccgcgaaggttccagtgtgggaatgtcaaaagtagtagcagaaaatgctctacaagatgcattaagattggcatttcagcacgatgaagaagtattgattgaaaaatggctaagtgggccggagttcacggttgcgatactcggtgaagaaattttaccgtcaatacgtattcaaccgtccggaaccttctatgattatgaggcgaagtatctctctgatgagacacagtatttctgccccgcaggtctggaagcgtcacaagaggccaatttgcaggcattagtgctgaaagcatggacgacgttaggttgcaaaggatggggacgtattgacgttatgctggacagcgatggacagttttatctgctggaagccaatacctcaccgggtatgaccagccacagcctggtgccgatggcggcacgtcaggcaggtatgagcttctcgcagttggtagtacgaattctggaactggcggactaatatgtcgcaggctgctctgaacacgcgaaacagcgaagaagaggtttcttctcgccgcaataatggaacgcgtctggcggggatccttttcctgctgaccgttttaacgacagtgttggtgagcggctgggtcgtgttgggctggatggaagatgcgcaacgcctgccgctctcaaagctggtgttgaccggtgaacgccattacacgcgtaatgacgatatccggcagtcgatcctggcattgggtgagccgggtacctttatgacccaggatgtcaacatcatccagacgcaaatagaacaacgtctgccgtggattaagcaggtgagcgtcagaaagcagtggcctgatgaattgaagattcatctggttgaatatgtgccgattgcgcggtggaatgatcaacacatggtagacgcggaaggaaataccttcagcgtgccgccagatcgcaccagcaagcaggtgcttccaatgctgtatggcccggaaggcagcgccaatgaagtgttgcagggctatcgcgaaatggggcagatgctggcaaaggacagatttactctgaaggaagcggcgatgaccgcgcggcgttcctggcagttgacgctgaataacgatattaagctcaatcttggccggggcgatacgatgaaacgtttggctcgctttgtagaactttatccggttctacagcagcaggcgcaaaccgatggcaaacggattagctacgttgatttgcgttatgactctggagcggcagtaggctgggcgcccttgccgccagaggaatctactcagcaacaaaatcaggcacaggcagaacaacaatgatcaaggcgacggacagaaaactggtagtaggactggagattggtaccgcgaaggttgccgctttagtaggggaagttctgcccgacggtatggtcaatatcattggcgtgggcagctgcccgtcgcgtggtatggataaaggcggggtgaacgacctcgaatccgtggtcaagtgcgtacaacgtgccattgaccaggcagaattgatggcagattgtcagatctcttcggtatatctggcgctttctggtaagcacatcagctgccagaatgaaattggtatggtgcctatttctgaagaagaagtaacgcaagaagatgtggaaaacgtcgtccataccgcgaaatcggtgcgtgtacgcgatgagcatcgtgtgctgcatgtgatcccgcaagagtatgcgattgactatcaggaagggatcaagaatccggtagggctttcgggcgtgcggatgcaggcaaaagtgcacctgatcacatgccacaacgatatggcgaaaaacatcgtcaaagcggttgaacgttgtgggctgaaagttgaccaactgatatttgccggtctggcatcaagttattcggtattgacggaagatgaacgtgaactgggtgtctgcgtcgtcgatatcggtggtggtacaatggatatcgccgtttataccggtggggcattgcgccacactaaggtaattccttatgctggcaatgtcgtgaccagtgatatcgcttacgcctttggcacgccgccaagcgacgccgaagcgattaaagttcgccacggttgtgcgctgggttccatcgttggaaaagatgagagcgtggaagtgccgagcgtaggcggtcgtccgccgcggagtctgcaacgtcagaccctggcagaggtgatcgagccgcgctataccgagctgctcaacctggtcaacgaagagatattgcagttgcaggaaaagcttcgccaacaaggggttaaacatcacctggcggcaggcattgtattaaccggtggcgcagcgcagatcgaaggtcttgcagcctgtgctcagcgcgtgtttcatacgcaagtgcgtatcnncgcgccgctgaacattaccggtttaacggattatgctcaggagccgtattattcgacggcggtgggattgcttcactatgggaaagagtcacatcttaacggtgaagctgaagtagaaaaacgtgttacagcatcagttggctcgtggatcaagcgactcaatagttggctgcgaaaagagttttaatttttatgaggccgacgatgattacggcctcaggcgacaggcacaaatcggagagaaactatgtttgaaccaatggaacttaccaatgacgcggtgattaaagtcatcggcgtcggcggcggcggcggtaatgctgttgaacacatggtgcgcgagcgcattgaaggtgttgaattcttcgcggtaaataccgatgcacaagcgctgcgtaaaacagcggttggacagacgattcaaatcggtagcggtatcaccaaaggactgggcgctggcgctaatccagaagttggccgcaatgcggcagatgaggatcgcgatgcactgcgtgcggcgctggaaggtgcagacatggtctttattgctgcgggtatgggtggtggtaccggtacaggtgcagcaccagtcgtcgctgaagtggcaaaagatttgggtatcctgaccgttgctgtcgtcactaagcccttcaactttgaaggcaagaagcgtatggcattcgcggagcaggggatcactgaactgtccaagcatgtggactctctgatcactatcccgaacgacaaactgctgaaagttctgggccgcggtatctccctgctggatgcgtttggcgcagcgaacgatgtactcaaaggcgctgtgcaaggcatcgccgaactgattactcgtccgggtttgatgaacgtggactttgcagacgtacgcaccgtaatgtctgaaatgggctacgcaatgatgggttctggcgtggcgagcggtgaagaccgtgcggaagaagctgctgaaatggctatctcttctccgctgctggaagatatcgacctgtctggcgcacgcggcgtgctggttaacatcacagcgggcttcgacctgcgtctggatgagttcgaaacggtaggtaacaccatccgtgcatttgcttccgacaacgcgactgtggttatcggtacttctcttgacccggatatgaatgacgagctgcgcgtaaccgttgttgcgacaggtatcggcatggacaaacgtcctgaaatcactctggtgaccaataagcaggttcagcagccagtgatggatcgctaccagcagcatgggatggctccgctgacccaggagcagaagccggttgctaaagtcgtgaatgacaatgcgccgcaaactgcgaaagagccggattatctggatatcccagcattcctgcgtaagcaagctgattaagaattgactggaatttgggtttcgaggctctttgtgctaaactggcccgccgaatgtatagtacacttcggttggataggtaatttggcgagataatacgatgatcaaacaaaggacacttaaacgtatcgttcaggcgacgggtgtcggtttacataccggcaagaaagtcaccctgacgttacgccctgcgccggccaacaccggggtcatctatcgtcgcaccgacttgaatccaccggtagatttcccggccgatgccaaatctgtgcgtgataccatgctctgtacgtgtctggtcaacgagcatgatgtacggatttcaaccgtagagcacctcaatgctgctctcgcgggcttgggcatcgataacattgttatcgaagttaacgcgccggaaatcccgatcatggacggcagcgccgctccgtttgtatacctgctgcttgacgccggtatcgacgagttgaactgcgccaaaaaatttgttcgcatcaaagagactattcgtgtcgaagatggcgataagtgggctgaatttaagccgtacaatggtttttcgctggatttcaccatcgattttaaccatccggctattgattccagcaaccagcgctatgcgatgaacttctccgctgatgcgtttatgcgccagatcagccgtgcgcgtacgttcggtttcatgcgtgatatcgaatatctgcagtcccgtggtttgtgcctgggcggcagcttcgattgtgccatcgttgttgacgattatcgcgtactgaacgaagacggcctgcgttttgaagacgaatttgtgcgtcacaaaatgctcgatgcgatcggtgacttgttcatgtgtggtcacaatattattggtgcatttaccgcttataaatccggtcatgcactgaataacaaactgctgcaggctgtcctggcgaaacaggaagcctgggaatatgtgaccttccaggacgacgcagaactgccgttggccttcaaagcgccttcagccgtactggcataacgacatttatactgtcgtataaaattcgactggcaaatctggcactctctccggccaggtgaaccagtcgttttttttgaattttataagagctataaaaaacggtgcgaacgctgttttcttaagcacttttacggacaacttatcttcattcgtgctgtggacttcaggctttaatgataagatttgtgcgctaaatacgtttgaatacgatcgggatggcaataacgtgagtggaatactgacgcgctggcgacagtttggtaaacgctacttctggccgcatctcttattagggatggttgcggcgagtttaggtttgcctgcgctcagcaacgccgccgaaccaaacgcgcccgcaaaagcgacaacccgcaaccacgagccttcagccaaagttaactttggtcaattggccttgctggaagcgaacacgcgccgcccgaattcgaactattccgtagattactggcatcaacatgccattcgcacggtaatccgtcatctttccttcgcaatggcaccgcaaacgctgcccgttgctgaagaatctttgcctcttcaggcgcaacatcttgcattactggatacgctcagcgcgctgctgacccaggaaggcacgccgtctgaaaagggttatcgcattgattatgcgcattttaccccacaagcaaaattcagcacgcccgtctggataagccaggcgcaaggcatccgtgctggccctcaacgcctcagctaacaacaataaacctttacttcattttattaactccgcaacgcggggcgtttgagattttattatgctaatcaaattattaactaaagttttcggtagtcgtaacgatcgcaccctgcgccggatgcgcaaagtggtcaacatcatcaatgccatggaaccggagatggaaaaactctccgacgaagaactgaaagggaaaaccgcagagtttcgtgcacgtctggaaaaaggcgaagtgctggaaaatctgatcccggaagctttcgccgtggtacgtgaggcaagtaagcgcgtctttggtatgcgtcacttcgacgttcagttactcggcggtatggttcttaacgaacgctgcatcgccgaaatgcgtaccggtgaaggtaaaaccctgaccgcaacgctgcctgcttatctgaacgcactaaccggtaaaggcgtgcatgtagttaccgtcaacgactacctggcgcaacgtgacgccgaaaacaaccgtccgctgtttgaattccttggcctgactgtcggtatcaacctgccgggcatgccagcaccggcaaagcgcgaagcttacgcagctgacatcacttacggtacgaacaacgaatacggctttgactacctgcgcgacaatatggcgttcagccctgaagaacgtgtacagcgtaaactgcattatgcgctggtggacgaagtggactccatcctgatcgatgaagcgcgtacaccgctgatcatttccggcccggcagaagacagctcggaaatgtataaacgcgtgaataaaattattccgcacctgatccgtcaggaaaaagaagactccgaaaccttccagggcgaaggccacttctcggtggacgaaaaatctcgccaggtgaacctgaccgaacgtggtctggtgctgattgaagagctgctggtgaaagagggcatcatggatgaaggggagtctctgtactctccggccaacatcatgctgatgcaccacgtaacggcggcgctgcgcgctcatgcgctgtttacccgtgacgtcgactacatcgttaaagatggtgaagttatcatcgttgacgaacacaccggtcgtaccatgcagggccgtcgctggtccgatggtctgcaccaggctgtggaagcgaaagaaggtgtgcagatccagaacgaaaaccaaacgctggcttcgatcaccttccagaactacttccgtctgtatgaaaaactggcggggatgaccggtactgctgataccgaagctttcgaatttagctccatctacaaactggataccgtcgttgttccgaccaaccgtccaatgattcgtaaagatctgccggacctggtctacatgactgaagcggaaaaaattcaggcgatcattgaagatatcaaagaacgtactgcgaaaggccagccggtgctggtgggtactatctccatcgaaaaatcggagctggtgtcaaacgaactgaccaaagccggtattaagcacaatgtcctgaacgccaaattccacgccaacgaagcggcgattgttgctcaggcaggttatccggctgcggtgactatcgcgaccaacatggcgggtcgtggtacagatattgtgctcggtggtagctggcaggcagaagttgccgcgctggaaaatccgaccgcagagcaaattgaaaaaattaaagctgactggcaggtacgtcacgatgcggtactggcagcaggtggcctgcatatcatcggtaccgagcgtcacgaatcccgtcgtatcgataaccagttgcgcggtcgttctggtcgtcagggggatgctggttcttcccgtttctacctgtcgatggaagatgcgctgatgcgtatttttgcttccgaccgagtatccggcatgatgcgtaaactgggtatgaagccaggcgaagccattgaacacccgtgggtgactaaagcgattgccaacgcccagcgtaaagttgaaagtcgtaacttcgacattcgtaagcaactgctggaatatgatgacgtggctaacgatcagcgtcgcgccatttactcccagcgtaacgaattgctggatgtcagcgatgtgagcgaaaccattaacagcattcgtgaagatgtgttcaaagcgaccattgatgcctacattccgccacagtcgctggaagaaatgtgggatattccggggctgcaggaacgtctgaagaacgatttcgacctcgatttaccaattgctgagtggctggataaagaaccagaactgcatgaagagacgctgcgtgagcgcattctggcgcagtccatcgaagtgtatcagcgtaaagaagaagtggttggtgctgagatgatgcgtcacttcgagaaaggcgtcatgctgcaaacgcttgactccctgtggaaagagcacctggcagcgatggactatctgcgtcagggtatccacctgcgtggctatgcacagaaagatccgaagcaggaatacaaacgtgaatcgttctccatgtttgcagcgatgctggagtcgttgaaatatgaagttatcagtacgctgagcaaagttcaggtacgtatgcctgaagaggttgaggagctggaacaacagcgtcgtatggaagccgagcgtttagcgcaaatgcagcagcttagccatcaggatgacgactctgcagccgcagctgcactggcggcgcaaaccggtgagcgcaaagtaggacgtaacgatccttgcccgtgcggttctggtaaaaaatacaagcagtgccatggccgcctgcaataaaagctaactgttgaagtaaaaggcgcaggattctgcgccttttttataggtttaagacaatgaaaaagctgcaaattgcggtaggtattattcgcaacgagaacaatgaaatctttataacgcgtcgcgcagcagatgcgcacatggcgaataaactggagtttcccggcggtaaaattgaaatgggtgaaacgccggaacaggcggtggtgcgtgaacttcaggaagaagtcgggattaccccacaacatttttcgctatttgaaaaactggaatatgaattcccggacaggcatataactctgtggttctggctggtcgaaagctgggaaggggagccgtggggtaaagaagggcaacccggtaagtggatgtcgctagtcggtcttaatgccgatgattttccgccagccaatgaaccggtaattgcgaagcttaagcgtgtgtatgtcggataaggcgttcacgccgcatccgacatttgcacaagatgcctgatgcgacgctgtccgcgtcttatcaggcctacgtgcggcatcagacaaatgtcactgctttggctcttcgctccagtcatcgctttcggaaagatcgccactgctggggattcgtttttcttcagcagcccattctccgaggtcgatcagctgacaacgtttggagcaaaatggccgaaacgggctgatttcaccccacaccaccgttttcccgcaggttgggcaattcaccgtaatagtttctgacatttttactccttagcaacaggccagttcgaaatccagacgttccggtacctgtccgttttcagtgtccagcggcataaaacgaatggcaaaacggctcttatgtccggaaatttgcggataaagctgtgaatcgagcgacagattcaggcgcagcaagtcggcatcgccaccgttatcctgataaaaaccattcaggctggtttgtttacggaagggggccgactggcgaattaaatccagcaccatggtaagtgcctgggtgagcgggttcaggctggcaatccaggtttctacctggcagtcgcgctgcgcctggggtagatgcagccaaatgtgcaatgtaggtaaatcaaagctgcaacagccgcctgggatgctcagtcgctgacgcaccagagcaatcaaacgatcttcacgcagaaattgcccgatacgcggcgcggaaattaatacgctccccgccgcttttaactgctgaattaatgcttcaatacggctctggtccacgccaggcacgccaatccaggtctggagtttacgttgctgccggtcaagttctttcaacagctcagtgcggacttcgccgcgctcgaaaacatccagtaattcactaacattacggaagaaatgcagcgcgccagcgtggtcaacgatgggtaaattaacggtgagttgctgaatcaaaaactcaatgcgcagccatgtacgcattttttcatttagtggatgttcaaaaaggacctgggtctgcattacggtttttcctgtgagacaaactgcgacgcaagctgcaaatagtgtgcgtgcaggcgggcaacatccgatgcgatagcatccggtgcgccgttattatcaatgacgtcatctgccacggcaaggcgggcttcgcgcgttgcctgagcagcaaggatttgttcgacatgctcgcgagttacatcatcgcgctgcatggtgcgcttaagttgcgtttctgggctgacatccaccaccagcactcgattcgcttttttatacagtgagttttctaccagcaatggcacaacccacagtacatagggggaagtagcttgctggatctggtgttgcgtctcttgctgaatcagcggatgcagcagggcgttaagccagtttttctcttccgggttggcgaagatccgctcgcgcaaggcccggcgctgcaatgttccatcagcagcaatcatattagcgccaaagtgatcagcaatggcatgtagcgcaggtgcacctggttcaaccacctgacgcgcaataatatcggcatcaatgacgttaattccgagatcagcaaacgcattggcaacggtactcttgccactgccaatgcctcccgttaaggcaactatatacctcataatttatattcccgggaattcatcatgattatcaaaacgttaaaaatgagcgcacgaaagcgaaattgatgaaacgttcgctcactatttaccaggtaaatttatgggattgtagcgtaaaaaaagacaatttcgcagtcttgcgccgcattgattagtgcgtatgatagcgtcactggagttgcgctcttacccttatagccattaaccccaggaatccgcacatgcgtattgaagaagatctgaagttaggttttaaagacgttctcatccgccctaaacgctccactcttaaaagccgttccgatgttgaactggaacgtcaattcaccttcaaacattcaggtcagagctggtccggcgtgccgattatcgccgcaaatatggacaccgtaggcacattttctatggcctctgcgctggcttcttttgatattttgactgctgtgcataaacactattctgtcgaagagtggcaagcgtttatcaacaattcttccgctgatgtgctgaaacatgtgatggtttctaccggtacgtctgatgcggatttcgaaaaaactaaacagattctcgacctgaacccggcattaaacttcgtttgtattgacgtggcgaatggttattccgaacacttcgtgcagttcgttgcgaaagcgcgtgaagcgtggccgaccaaaaccatttgtgctggtaacgtagtgactggtgaaatgtgtgaggagcttatcctctcaggtgccgatatcgttaaagttggcattggcccaggttctgtttgtacaactcgcgtcaaaacaggcgtcggttatccgcaactttctgcggtaatcgaatgtgccgatgctgcgcacggtctgggcggaatgatcatcagcgatggtggctgcaccacgccgggcgatgtggcgaaagcctttggtggcggtgccgatttcgtcatgcttggcggcatgctggcgggccacgaagagagcggcggtcgcatcgttgaggagaacggcgagaaatttatgctgttctacggcatgagctccgagtctgcgatgaaacgtcacgttggcggcgttgctgaatatcgcgcagcagaaggtaaaaccgttaagctgccgctgcgaggcccggttgaaaataccgcgcgtgatattttgggcggcctgcgttcagcttgtacatacgttggggcttcacgcctgaaagaactgaccaagcgcaccacatttatccgtgtgcaggaacaagaaaaccgcatcttcaacaacctgtaatcttccaacgctggtgtggagcaacacgccagcgttatcccatcccactcatcgcatcgcctaaatggaaaattggcagatacatcgccaccaccagcgtaccgataattcctcccgttatgatcagcaacgccggttccagtaaggctgctaggttatccgccagcgccattgtgttatcccgatgatgatgggcgatgttgtctaacatgagatccagcgagccggaggcctctcccgttctcactaattgcaaacagagcgggctaaactcaccggcattttttaacgccagccagatgggatgaccgttactgatatcgtgctggatttgtgtcagaagttgcacccagtacgggcagcgcattgtttctctgacgctctctacgccctgtaaaaaagtaatgcctgcactttgagtcagcgccagaatcgtaaagatctgcgtgagtttttgtccccgcatcagtgaccccataatcgggatgcgtaacagcaatttctgccgcgcgataagccaggtcgggcggcgcatcagcaacttattggctatcgtcagcataatgccgaacaacaccagcagccagccccattcgccactaaagtctgccagcgtcatgatcccctgcgttagtgccggtagtggggtgttgaaggtcttatagatagcggcaaactccggcagaacaaaatgcagcattgccacaaccaccatgattgccatcgctaaaatgatgatgggataacgtaacgctgattttactttgtcggtcaactgacgctgggctctttgctgacgcgccagttcaaagcagcattcatccagcttaccggtcagttcacccgtgcggatcatcgcctgatagagcggcggaaatacctctgaccagggtaataaggcattggaaaaggcaatgccctgttcgagatcgtgtgccagagattgcagcaacgcttgccattgcttactgggatgctgttccgccagcagtgccagcccttcagaaagcgttaacccggctttaagtagcgtcgccagttgatgaatgacttccgcgcttttatctcctcgccactgcgcagaattgatagcaattcgcttcaggcttagtggggtaaccatctgttgctgtagtgccataagcagtaaagtacggctctctgcccatagcatcccatcttgcgcattgccgtcgccggttatgccatgccagcgccagagttgcttactcgccatgcggcatccccaatacgcggattaactcttcaaaggtggttaagccttgctccacggccaggcagccgttttcaaaaagcgttcgcatacccgcctgtcgggcgtgcgtttccagcgattcaacgtcggtattagcggaaataagctgacgtatgaccggtgttatgggcagaacttcaaataaggcagtgcgaccataaaaaccgtggtagcaatgtacacaaccgggtgcttgccagtggggcagcggcgacggccatacattgactggaatgtggatgggctccccttgctgccggcgacaatgtgggcaaagtttgcgtaccagacgctgggctattaccagcgtaagcgccgatgatagcattcagcgggcgacccccatttgctgtaaacgtaccagcgtttcgcaggtggaattagtgtgtagggtagacaacaccaggtgaccggtttgcgcggctttaatggcaatttctgccgtttcgccatcgcggatctctccgatcatgatgacgtcaggatcctggcgcaataacgcacgcaaaacgccctgaaaggtgagtccggcacgcggatggatttgcgtctggtttagtccggctatggggatctcaaccggatcttcgacgctacaaatattaatgtcagcggtattcagcttttgcagagcactataaagcgtgaccgttttgccgctgccggtagggccagttaccagcaccagtccctgtggttgttgcaaggcatgagcaaagcccgccagttgtaacggctgcattcccagcgtgttaacatccagtgcctggctcacctgctgtaacaaccttaataccaccttttcaccaccccgacatggtaaggtcgcaatacgaaatgagacggcgtttcctgccagttcgacagtgaattgcccgtcctgcggcaggcgatgttccgcaatatccaggtttcccagcacttttaatctggcggttaatgcgactccggcatccggtgaaacatccggtaaaggatgcaatacgccgtcgatacgcaagcggatgcggtaggcattgtccgctggttcgatatgaatatcagacgcgcgttgttccagcgcagattgtaacgttcgagtcagcaactctgctttgggctgatgcttctcctgaacagctacgggcaatgtctgttgtgtgcgactggcgtgaccttccatttgttggcgcgtccagcaggtgatctcaatacgtttggtggtagcgaaatgcaatgcgtccagcaactcatgtgagggggcatcgaccaccgcaacatgaaccacttcttcgctggcatccagcaagactccctgataacgcaggcacagggccgtgagctgtggaatattcattgccgctccttagttggcgtcatcaaagcggaagacatcttcgcaggcttgctgcaatgcgctgtcactttgaatattgcagttgcgcgcccagccggtgacgccgtttgcgttatcccaacctggcgtcatgacgacgcttagcccattgagactttcttgcccggtcagcgacaccacgccctttgccacactcatggctgaaacatagcgggtggtggtaggcgagggaatgccattgctgccaccgtcgcaggtatctaatccaccatgttccagcgcgcacaactctacggcggtacggtaaggcacaaaggtttgtagcatgtcggtgagtgcggctttgcgcaggtagttttgataagcgggaataccaatggcgcttaaaatggcaatgatgccaataaccaccatcagttcgataagtgtaaaaccgcgttgcttgtccatctgtttcgctccttgatttggttggtgctactttggcaaacgccatcagcacaggcgaggggcaaaaaacgaaacgggaaagctgcttccgaggttttttatttcgttgcagcgaaagacaagaaatttgcgaggcgttacgaagaaggttggggaaggggagattatccgcccactatggagcggataaatctgtcagcaactagcgaaaacgcattgaaaggtcgagtgcctgtacgtgcttagttagcgcaccgacggagataaagtccacgcccgtttcggcaaattcgcgcagtgttttgtcagtgacgttgccagacacttccagtagcgccttgccgttggtgcgtttgacggcttcgcgcatctgttctgtttcgaagttatccagcatgatgatatcggctcctgctttcagggcttcatcaagttcttccagattctctacttcgacttctactggcgcatccgggtgcagccaggacgctttttcgaccgcctggcgcactgagccggaggcaataatatggttttctttgatcaggaaggcatcagaaagccccagacggtgattcgctccgccgccgcaaagtaccgcgtatttcagcgctgaacgcagaccgggtaaggttttacgcgtatccaacaactgcgtgttggtgccttccagtaattcgacatagtggcgtaccttactggcaactcctgaaagggtttgcacaaaattaagcgcagtgcgttcgcccgttaacagcacgcgggatgggccttcaagttcgaacaagggttgattggcgttgatgacatcgccgtcatccacatgccagattatggtgacatcgtcgcctgccagttgaataaacacctcttcaacccagcgtttgccgcaaaatacgccattctcgcgggtgatcaccgtggcatgagagcgagaattttccggtaaaagttttgccgtaatgtcattgttggcatcgactgttccgcctaaatcttcccgcagcgcctgggccaccgcgccggggatatcgagattaatgcgttccagcagctcgtcacgtcgggtgtcagggttatagcggcgaggcggcatgttaaaactccagatagctaacgaatcataaggtagaaacatgctactctgaaccgggtattagcaccacatataaggagatcctgcatgttgttagaacaggggtggctggttggcgcnnnccgcgttccctcaccacattacgattgccgcccggatgacgaaacacccaccctgctggtggtgcacaatattagcctgccgccaggcgagtttggcggtccgtggatcgacgcattattcactggaactattgatccgcaggcacatcctttctttgctgagatcgcccatttgcgcgtctccgctcactgtttgattcgccgtgatggtgaaatagtccagtatgttcctttcgataaacgtgcatggcatgcgggagtctctcagtatcaggggcgcgaacgctgcaatgatttttctattgggattgagcttgaaggcaccgatacgctggcgtataccgatgcgcagtatcaacagcttgcggcggttacgcgggcactgattgattgctatccggatatcgctaataacatgacgggccattgtgatattgcgccggatcggaaaaccgatcccggtcctgcatttgattgggcacggtttcgtgcgctggtcagcaaggagacaacatgacgctatttacaaccttactggtgttaattttcgagcgcctgtttaagttgggcgagcactggcagcttgatcatcgtcttgaagcgttctttcggcgggtgaaacatttttctctcgggcgcacgttaggcatgaccattattgcgatgggcgtgacttttttactgttacgcgcattgcagggagtattgttcaacgttcccacgctgctggtgtggctgctgattggtttgctgtgtattggcgcaggtaaagttcgtcttcattatcatgcttatctgacagctgcttcacgtaatgatagccatgcccgtgccacgatggctggcgaactcaccatgattcacggcgtcccggcaggctgcgacgaacgtgagtatttgcgtgagctgcaaaatgcattgctgtggattaactttcgttttcatcttgcaccgctgttctggctgattgtggggggaacctggggacccgttacgctgatggggtatgcgttcttgcgtgcatggcaatactggctggcgcgataccagacgccgcatcatcgtttacagtccggcattgatgcagtgcttcatgtactggattgggtgccggttcgtcttgcaggtgtggtatatgccttgatcggtcatggtgagaaagcgttaccggcctggtttgcttcgctgggtgatttccgtacttcgcaatatcaggtattaacgcgtctggcgcagttctctctggcgcgtgaaccgcatgtcgataaggtggagacgccgaaggcagcggtttcaatggcgaagaaaacctcgttcgtggtcgtggtggtgattgcgctactgacgatttacggggcgttggtgtaaagattattgccctcaccctgtacgggtgagggcgtagagagattaatgtgcttttacggcttttgcggttttctctttaaacagatagccgatacctaacaccaccagccataccgggatcaggtataccgaaatcgccattcctggggtcatcagcataatcaccagtaccaccgccataaacagcaggcagatccagttacccagcggataaagcagagcagggaagcgagttaccacgccttgttcctgcttggcgcgacggaacttcatatgcgccagactgatcatcgcccagttgatcaccagtgcggataccaccagtgccattaacaggccaaatgcggattccggagcaagatagttaatcaatacgcacaatgctgtaaccagcgcagacaccagaatggtgttaaccggtacgccgcgtttatcgacagacgccagcgcttttggcgcgttaccctgttgtgccagaccaaacagcatacggctgttgcaatatacgcagctgttgtacacggagagcgccgcagtcagtaccacgatgttcagcgcattcgccacaaaggtatcgcctaactcgtggaagatcagcacaaacggactggtatcggcggtaacgcgggtccacggcatcagtgagagcagaacggctaacgaaccaatatagaaaatcaggatgcggtagataacctggttagttgctttcgggatactttgctccgggttatcagcttctgctgcggtgatccccaccagttccagaccaccgaacgagaacatgataatcgccatcatcatcaccagcccggtgaagccgtgcggcaggaaaccgccctgatcccacaggttgctaacgcttgcctgcggaccgccgttaccactgaacagcagccagccgccgaagatgatcatcgctactaccgcaataactttgataatggcaaaccagaactccatctcaccaaacacttttacgttggtcaggttgatggcgttaatcaccacaaagaacacggcggcagaaacccaggttgggatttccggataccagaactgaatgtatttacccacagcagtcagctctgccatggcaactaaaacgtacagtacccagtagttccagccagaagcgaagccagcaaagctgccccagtatttataagcaaagtggctaaaggagcctgcgacaggttcttcgaccaccatttcacccagctgacgcatgatcagaaaggcgataaaaccagcaatggcgtaacccaggataatccctggccctgcggactgtattacggaggcgctacccaggaataaccctgtccctatcgcgccacccagcgcgataagctgaatatggcggtttttaaggccgcgctttagctgctcgccgtgctgttgaccttccatcatgaaacctcgtgcggtgattgtttttttgatctacgcagtgatgcgtgtgtaagtttgcaattccgtttgttgtattaatttgtttacatcaaagaagtttgaattgttacaaaaagacttccgtcagatcaagaataatggtatgcggcagcgaatgcacccgctttatgcatggttgaagatgagttgcttaaaaagaaaccgtttgtaaagctcagcctcaacccctctcaatatgcagaatgaatttaaatnnnnnnnnnnngaattaaaaatcacaaaattggtaagtgaatcggttcaattcggatttttatagtttaataatcgttaaaaaatccctttcctacgtaaagtctacatttgtgcatagttacaactttgaaacgttatatatgtcaagttgttaaaatgtgcacagtttcatgatttcaatcaaaacctgtatggacataaggtgaatactttgttactttagcgtcacagacatgaaattggtaagaccaattgacttcggcaagtggcttaagacaggaactcatggcctacagcaaaatccgccaaccaaaactctccgatgtgattgagcagcaactggagtttttgatcctcgaaggcactctccgcccgggcgaaaaactcccaccggaacgcgaactggcaaaacagtttgacgtctcccgtccctcattgcgtgaggcgattcaacgtctcgaagcgaagggcttgttgcttcgtcgccagggtggcggcacttttgtccagagcagcctatggcaaagcttcagcgatccgctggtggagctgctctccgaccatcctgaatcacagtatgacttgctcgaaacacgacacgccctggaaggtatcgccgcttattacgccgcgctgcgtagtaccgatgaagacaaggaacgcatccgtgaactccaccacgccatagaactggcgcagcagtctggcgatctggacgcggaatcaaacgccgtactccagtatcagattgccgtcaccgaagcggcccacaatgtggttctgcttcatctgctaaggtgtatggagccgatgttggcccagaatgtccgccagaacttcgaattgctctattcgcgtcgcgagatgctgccgctggtgagtagtcaccgcacccgcatatttgaagcgattatggccggtaagccggaagaagcgcgcgaagcatcgcatcgccatctggcctttatcgaagaaattttgctcgacagaagccgtgaagaaagccgccgtgagcgttctctgcgtcgtctggagcaacgaaagaattagtgatttttctggtaaaaattatccagaagatgttgtaaatcaagcgcatataaaagcgcggcaactaaacgtagaacctgtcttattgagctttccggcgagagttcaatgggacaggttccagaaaactcaacgttattagatagataaggaataacccatgtcagaacgtttcccaaatgacgtggatccgatcgaaactcgcgactggctccaggcgatcgaatcggtcatccgtgaagaaggtgttgagcgtgctcagtatctgatcgaccaactgcttgctgaagcccgcaaaggcggtgtcaacgtagccgcaggcaccggtatcagcaactacatcaacaccatccccgttgaagaacaaccggagtatccgggtaatctggaactggaacgccgtattcgttcagctatccgctggaacgccatcatgacggttctgcgtgcgtcgaaaaaagacctcgaactgggcggccacatggcgtccttccagtcttccgcaaccatttatgatgtgtgctttaaccacttcttccgtgcacgcaacgagcaggatggcggcgacctggtttacttccagggccacatctccccgggcgtgtacgctcgtgctttcctggaaggtcgtctgactcaagagcagctggataacttccgtcaggaagttcacggcaatggcctctcttcctatccgcacccgaaattgatgccggaattctggcagttcccgaccgtatctatgggtctgggtccgattggtgctatttaccaggctaaattcctgaaatatctggaacaccgtggcctgaaagatacctctaaacagaccgtttacgcgttcctcggcgacggtgaaatggacgaaccggaatccaaaggtgcgatcaccatcgctacccgtgaaaaactggataacctggtcttcgttatcaactgtaacctgcagcgtcttgacggcccggtcaccggtaacggcaagatcatcaacgaactggaaggtatcttcgaaggtgctggctggaacgtgatcaaagtgatgtggggtagccgttgggatgaactgctgcgtaaagataccagcggtaaactgatccagctgatgaacgaaaccgttgacggcgactaccagaccttcaaatcgaaagatggtgcgtacgttcgtgaacacttcttcggtaaatatcctgaaaccgcagcactggttgcagactggactgacgagcagatctgggcactgaaccgtggtggtcacgatccgaagaaaatctacgctgcattcaagaaagcgcaggaaaccaaaggcaaagcgacggtaatccttgctcataccattaaaggttacggcatgggcgacgcggctgaaggtaaaaacatcgcgcaccaggttaagaaaatgaacatggacggtgtgcgtcacatccgcgaccgtttcaatgtgccggtgtctgatgcagatatcgaaaaactgccgtacatcaccttcccggaaggttctgaagagcatacctatctgcacgcacagcgtcagaaactgcacggttatctgccaagccgtcagccgaacttcaccgagaagcttgagctgccaagcctgcaagacttcggcgcgctgctggaagagcagagcaaagagatctctaccactatcgctttcgttcgtgccctgaacgtgatgctgaagaacaagtcgatcaaagatcgtctggtaccgatcatcgccgacgaagcgcgtactttcggtatggaaggtctgttccgtcagattggtatttacagcccgaacggtcagcagtacaccccgcaggaccgcgagcaggttgcttactataaagaagacgagaaaggtcagattctgcaggaagggatcaacgagctgggngcaggttgttcctggctggcagcggcgacctcttacagcaccaacaatctgccgatgattccgttctacatctattactcgatgttcggcttccagcgtatcggcgatctgtgctgggcggctggcgaccagcaagcgcgtggcttcctgatcggcggtacttccggtcgtaccaccctgaacggtgaaggtctgcagcacgaagatggtcacagccacattcagtcgctgactattccgaactgtatctcttacgacccggcttacgcttacgaagttgctgtcattatgcatgacggtctggagcgtatgtacggtgaaaaacaagagaacgtttactactacatcaccacgctgaacgaaaactaccacatgccggcaatgccggaaggtgctgaggaaggtatccgtaaaggtatctacaaactcgaaaccattgaaggtagcaaaggtaaagttcagctgctgggctccggttctatcctgcgtcacgtccgtgaagcggcagagatcctggcgaaagattacggcgtaggttctgacgtttatagcgtgacctccttcaccgaactggcgcgtgatggtcaggattgtgaacgctggaacatgctgcatccgctggaaactccgcgcgttccgtatatcgctcaggtgatgaacgacgctccggctgtggcatctaccgactatatgaaactgttcgctgagcaggtccgtacttacgtaccggctgacgactaccgcgtactgggtactgatggcttcggtcgttccgacagccgtgagaacctgcgtcaccacttcgaagttgatgcttcttatgtcgtggttgcggcgctgggcgaactggctaaacgtggcgaaatcgataagaaagtggttgctgacgcaatcgccaaattcaacatcgatgcagataaagttaacccgcgtctggcgtaagaggtaaaagaataatggctatcgaaatcaaagtaccggacatcggggctgatgaagttgaaatcaccgagatcctggtcaaagtgggcgacaaagttgaagccgaacagtcgctgatcaccgtagaaggcgacaaagcttctatggaagttccgtctccgcaggcgggtatcgttaaagagatcaaagtctctgttggcgataaaacccagaccggcgcactgattatgattttcgattccgccgacggtgcagcagacgctgcacctgctcaggcagaagagaagaaagaagcagctccggcagcagcccccgcggctgccgcgnnnnaagacgttaacgttccggatatcggcagcgacgaagttgaagtgaccgaaatcctggtgaaagttggcgacaaagttgaagctgagcagtcgctgatcaccgtagaaggcgataaagcttctatggaagttccggctccgtttgcaggcaccgtgaaagaaatcaaagtgaacaccggcgacaaagtgtctaccggctcgctgattatggtcttcgaagtggcgggtgaagcaggcgcggcagctccggcggctaaacaggaagcggctccggcagcggcccctgcaccagcggctggcgtgaaagaagttaacgttccggatatcggcggtgacgaagttgaagtgaccgaagtgatggtgaaagtgggcgacaaagttgccgctgaacagtcactgattaccgtagaaggcgataaagcttctatggnnnntccggctccgtttgcaggcgtcgtgaaggaactgaaagtcaacgttggcgataaagtgaaaactggctcgctgattatgatcttcgaagttgaaggcgcagcgcctgcggcagctcctgcgaaacaggaagcagcagcgccggctccggcagcaaaagctgaagccccggcagcagcaccggctgcgaaagcggaaggcaaatctgaatttgctgaaaatgacgcttacgttcacgcgaccccgctgatccgccgtctggcacgcgagtttggcgttaaccttgcgaaagtgaagggcactggccgtaaaggtcgtatcctgcgcgaagacgttcaggcttacgtgaaagaagctatcaaacgtgcagaagcagctccggcagcgactggcggtggtatccctggcatgctgccgtggccgaaggtggacttcagcaagtttggtgaaatcgaagaagtggaactgggccgtatccagaaaatttctggtgcgaacctgagccgtaactgggtgatgatcccgcatgttactcacttcgacaaaaccgatatcaccgagctggaagcgttccgtaaacagcagaacgaagaagcggcgaaacgtaagctggatgtgaagatcaccccggttgtcttcatcatgaaagccgttgctgcagcgcttgagcagatgcctcgcttcaacagttcgctgtcggaagacggtcagcgtctgaccctgaagaaatacatcaacatcggtgtggcggtggataccccgaacggtctggttgttccggtattcaaagacgtcaacaagaaaggcatcatcgaactgtctcgcgagctgatgactatttctaagaaagcgcgtgacggtaagctgactgcgggcgaaatgcagggcggttgcttcaccatctccagcatcggcggcctgggtactacccacttcgcgccgattgtgaacgcgccggaagtggctatcctcggcgtttccaagtccgcgatggagccggtgtggaatggtaaagagttcgtgccgcgtctgatgctgccgatttctctctccttcgaccaccgcgtgatcgacggtgctgatggtgcccgtttcattaccatcattaacaacacgctgtctgacattcgccgtctggtgatgtaagtaaaagagccggcccaacggccggcttttttctggtaatctcatgaatgtattgaggttattagcgaatagacaaatcggttgccgtttgttgtttaaaaattgttaacaattttgtaaaataccgacggatagaacgacccggtggataatgggcgtcataaaaaaaacgtcagacccgccggagataaatatatagaggtcatgatgagtactgaaatcaaaactcaggtcgtggtacttggggcaggccccgcaggttactccgctgccttccgttgcgctgatttaggtctggaaaccgtaatcgtagaacgttacaacacccttggcggtgtttgcctgaacgtcggctgtatcccttctaaagcactgctgcacgtagcaaaagttatcgaagaagccaaagcgctggctgaacacggtatcgtcttcggcgaaccgaaaaccgatatcgacaagattcgtacctggaaagagaaagtgatcaatcagctgaccggtggtctggctggtatggcgaaaggccgcaaagtcaaagtggtcaacggtctgggtaaatttaccggggctaacaccctggaagttgaaggtgagaacggtaaaaccgtgatcaacttcgacaacgcgatcattgcagcgggttctcgcccgattcaactgccgtttattccgcatgaagatccgcgtatctgggactctactgacgcgctggaactgaaagaagtaccagaacgcctgctggtaatgggtggcggtatcatcggtctggaaatgggcaccgtttaccacgcgctgggttcacagattgacgtggttgaaatgttcgaccaggttatcccggcagctgacaaagacatcgttaaagtcttcaccaagcgtatcagcaagaaattcaacctgatgctggaaaccaaagttaccgccgttgaagcgaaagaagacggtatttatgtgacgatggaaggcaaaaaagcaccagctgaaccgcagcgttacgacgccgtgctggtagcgattggtcgtgtgccgaacggtaaaaacctcgacgcaggcaaagctggcgtggaagttgacgaccgtggtttcatccgcgttgacaaacagctgcgtaccaacgtaccgcacatctttgctatcggcgatatcgtcggtcagccgatgctggcacacaaaggtgttcacgaaggtcacgttgccgctgaagttatcgccggtaagaaacactacttcgatccgaaagttatcccgtccatcgcctataccgaaccagaagttgcatgggtaggtctgactgagaaagaagcgaaagagaaaggcatcagctatgaaaccgccaccttcccgtgggctgcttctggtcgtgctatcgcttccgactgcgcagacggtatgaccaagctgattttcgacaaagaatctcaccgtgtgatcggtggtgcgattgtcggtactaacggcggcgagctgctgggtgaaatcggcctggcaattgaaatgggttgtgatgctgaagacatcgcactgaccatccacgcgcacccgactctgcacgagtctgtgggcctggcggcagaagtgttcgaaggtagcattactgacctgccgaacccgaaagcgaagaagaagtaatttttcgtttgccggaacatccggcaattaaaaaagcggctaaccacgccgctttttttacgcctgtaatttacctttccagtcgccttgctccgcgctcagagagacgttcgcgtactgctgaccgttgctcgttattcagcctggcagtatggttactgtcgtttagacgttgtgggcggctctcctgaactttctcccgaaaaacctgacgttgttcaggtgatgctgattgaacacgctggcgggcgttatcacgttgctgttggttcagtgggcgctgctgtactttttccttaaacacctggcgctgctcaggcgaggctgactgaatacgctcacgcgctgcgtctcttcgctgctggatctgtgggttagtctgcattttctcgcggactgcctggcgctgctcaggcgaggcgggctgaatgcgctcacgcgctgcctctcttcgctgctggttctgcgggttagtctgcattttctcgtgaactgcctggcgctgctcaggagaagctgactgataacgctgacgagcggcgtccttttgttgctgggtcagtggttggcgacggctgaagtcgcggaagtcgtcatagctcccatagtgttcagcttcattaaaccgctgtgccgctgcctgacgttgggtatctcgtgtaatgacgggggcggcgtgtgttcgttgctgaaactgacttgctgccgcctgacgctggctgtcgcgtgttggagcaggtagctgcgtggcactcattccgccgttgacatcagtttgatgaaaccgctttgccatatcctgatcatgatagggcacaccattacggtagtttggattgtgccgccatgccatattcttatcagtaagatgctcaccggtgatacggttgaaattgttgacgtcgatattgatgttgtcgccgttatgttgccagccattaccgtcacgatgaccgccatcgtggtgatgataattatcatcgtcatgatgatgatggtcatgatcgtcgtcatcccagtcgatgctgctgaatagtgcgtacgtggtagcaacgcccatgctatagccgaatccgcgtacaaagctgtcaacaaacggttctccggctggtggtggcagataaaccggcggatacgcagtattggcccagttcccgtaaaccacggttgggttgtagttgggaatatagaccacatcaggattgccgggctcaatggaaatgacggttgttgcaggctctgtaatgacagggttggcagttgaaacggtattggatggtatgacgggagccgtgactgtctgtgttaccggtacagttttcttcgttgtggtaataactttctgttcggttgatgacttcagcgagccggtttgttgtgccagttgccgcaatcgttgtaccgagtccatcacgtcctgcggctgggccagaaaagcatcgcccaggttttgcacccattgcgggttttcgcccatcaatgccatcaattgtggaaaggccaccagtgatttaacgctggcgtcccacggctggtcagataccgcctgaatagcagcatcgccttgtttaagtggattatcgtgcgaccattgcactgcttgagcaacgtttgtcggataggttgatgccatcagcacctgcgaaagtagggcgtcgggatacagcgcgacgggcgcgacccattgatctatttgtgcagtgctgaatgcggatttgacgacggcgggtgttacgggaggtgcggaaaccgttgcaggaagcgtaactgcggcagcgtcagacacagccagttgtgtcgattgcgtttccacaggcgcttccactgtgcggctttttatatatagcccggcagaggcggcacaaagcccggcactgcaaattagcgccagcacatggggtttaaacggcaaagtcattttcataattcggatctcaaggaaatcgcaatggtcggcgaactgccacccgcaggtgctgtgaatccgagtataaagaggcggtagtttaaattttgactaatcttgggattcgttgagaaaggtgattntcaccatgcgaattaacgaagtttttacggagggaaacaatctctagaccatccttaacgattcagccacttttttatgttgcttttttgtaaacagattaacacgtcgtcaaaatcctgctattctgcccgttgcggtactgggcatttaccctacaaactgctgtctcacaggagcgtgaagagaatcgcctgccgcactatgacaatgagagcgaggagaaccgtcgtgctagaagaataccgtaagcacgtagctgagcgtgccgctgaggggattgcgcccaaacccctggatgcaaaccaaatggccgcgcttgtagagctgctgaaaaacccgcccgcgggcgaagaagaattcctgttagatctgttaaccaaccgtgttcctcctggcgtcgatgaagccgcctatgttaaagcaggcttcctggctgctgtcgccaaaggcgaagccaaatccccactgctgactccggaaaaagccatcgaactgctgggtactatgcagggtggttacaacattcatccgctgatcgatgcgctggatgatgccaaactggcaccgatcgctgccaaagcactttctcacacactactgatgttcgataacttctatgacgtagaagagaaagcgaaagcaggcaacgaatatgcgaagcaggttatgcagtcctgggctgatgccgaatggttcctgaatcgcccggcgctggctgaaaaactgaccgttaccgtcttcaaagtcactggcgaaaccaacaccgatgacctttctccggcaccggatgcgtggtcacgcccggatatcccattgcacgcgctggcgatgctgaaaaacgcccgtgaaggtattgagccagaccagccaggtgttgttggcccgatcaaacagattgaagctctgcaacagaaaggtttcccgctggcgtacgtcggtgacgttgtgggtacgggttcatcgcgtaaatccgccacgaactccgttctgtggtttatgggcgatgatattccacatgtgccgaacaaacgcggcggtggtttgtgcctcggcggtaaaattgcacccatcttctttaacacgatggaagatgcgggtgcgctgccaatcgaagtggatgtctctaacctgaacatgggcgacgtaattgacgtttacccgtacaaaggtgaagtacgtaaccacgaaaccggcgaactgctggcgaccttcgaactgaaaaccgacgtgctgattgatgaagtgcgtgctggcggccgtattccgctgattatcggtcgtggcctgaccaccaaagcgcgtgaagcacttggtctgccgcacagtgatgtgttccgtcaggcgaaagatgtcgctgagagcgatcgcggcttctcgctggcgcagaaaatggtaggccgtgcctgtggcgtgaaaggcattcgtccgggcgcgtactgtgaaccgaaaatgacttctgtaggctctcaggacaccacaggcccgatgacccgtgatgaactgaaagacctggcgtgcctgggcttctcggctgacctggtgatgcagtctttctgccacaccgcggcgtatccgaagccagttgacgtgaacacgcaccacacgctgccggacttcattatgaaccgtggcggtgtgtcgctgcgtccgggtgacggcgtaatccactcctggctgaaccgtatgctgctgccggataccgtcggtaccggtggtgactcccatacccgtttcccgatcggtatctctttcccggcgggttctggtctggtggcatttgcagccgcaacaggcgtaatgccgctggatatgccggaatccgttctggtgcgcttcaaaggcaaaatgcagccgggcatcaccctgcgcgatctggtacacgccattccgctgtatgcgatcaaacaaggtctgctgaccgttgagaagaaaggcaagaaaaacatcttctctggccgcatccnggaaattgaaggtctgccggatctgaaagttgagcaggcctttgagctgaccgatgcgtccgccgagcgttctgctgccggttgtaccatcaagctgaacaaagaaccaatcatcgaatacctgaactccaacatcgtcctgctgaagtggataatcgcggaaggttacggcgatcgtcgtaccctggaacgtcgtattcagggcatggaaaaatggctggcgaatcctgagctgctggaagccgatgcagatgcggaatacgcggcagtgatcgacatcgatctggcggatattaaagagccaatcctctgtgctccgaacgacccggacgacgcacgtccgctgtctgcggtacagggcgagaagatcgacgaagtgtttatcggttcttgcatgactaacatcggtcacttccgtgccgcaggtaaactgctggatgcgcacaaaggtcagttgccgacccgcctgtgggtggcaccgccaacccgtatggacgccgcacagttgaccgaagaaggctactacagcgtcttcggtaagagtggtgcgcgtatcgagatccctggctgttccctgtgtatgggtaaccaggcgcgtgtggcggacggtgcaacggtggtttccacctctacccgtaacttcccgaaccgtctgggtactggcgcgaatgtcttcctggcttctgcggaactggctgctgttgcggcgctgattggcaaactgccgacgccggaagagtaccagacctacgtggcgcaggtagataaaacagccgttgatacttaccgttatctgaacttcaaccagctttctcagtacaccgagaaagccgatggggtgattttccagactgcggtttaaaaagtcagcgcacgcgctgcgcataaacgacacaatgcccggtgaatgagattcccgggcatttttttatttctaaaccatcgccgttccgctgtttttctccggtaaggctgcgataattacatcaatggcgcaatgcgatttcggtgcattgccgggagcagaggaacacactatggattacgaatttctgcgcgatattaccggagtggtaaaggtgcgtatgtccatggggcatgaagtggtcgggcactggtttaatgaagaggtgaaagaaaacctggccttgcttgatgaagtggaacaagcagcgcacgcactgaaaggtagcgaacgttcctggcagcgggcagggcatgagtatacgctatggatggacggcgaagaggtgatggttcgcgccaatcaactggaattcgctggcgatgaaatggaagaggggatgaactactacgacgaagaaagcctgtcgctatgcggcgttgaggattttctgcaggtcgtggcggcttaccgcaatttcgtgcagcagaagtaaataaatctggcggagcctgggagctccgccagagccgttaaacagctggcatattgcgcccgtaataaatctcgcgcatttctttccacagcgcagcggtaatttcctggcgctcgctgtcggttaaatcttccggtttggtgtggaacatgtagtgcttaaggtcgaactctttaagcaacatcttggtatggaagatattttcctgatagacgtttacatccaccatgtcatacagcgccttcatatcgtcagacataaagttctgaatcgaattaatctcatggtcgataaagtgcttcataccgttaatgtcgcgggtaaaaccgcgcacgcgataatcaatggttacgatatcggactcaagctggtggatcaggtaattcagcgccttcagcggagaaatcacgccgcaggtagagacttcaatatcggcgcggaaggtacataaaccgccttcaggatgactttccgggtaggtatgtacgcaaatatgacttttatcgagatgggcaacgaccgtttctggcagtgggccggggtgttctgttttgtcgatgagtttcgggtcaaccggttcttcactcaccagaatagtgacgctggcaccctgtggttcgtaatcctggcgggcgatgttaagaatattagccccgataatggaacaggtttctgacaggatttcggtcagacggttggcattatagagttcatcgatataagcaatataaccgtcgcgctcttcggcagttttggcgtagcagatatcgtaaatacaaaaactcagacttttggtcagattattaaagccatgcagtttcagttttttcaatttcttatcttctccttaggacggctgtgaagccagtgcgtcttgcagatactggggtaaggcaaaagctgccgtatggactgccggattgtaataacggcatttcaggccagaggcgagaaaacgcgcctgaataatttcggttgagagatggcgtaaggcgtcgttatctgtcgcccatgcaaaagtcatgataccgccgtaataggtcgggatcgccgcctgataaaagccaacgtcgctgaagtaatggctgagtttgcgatggctgtcgatggcttcttcctgctgtaaaaagcagacgccgttttgtgcgacgaagataccgccaggattcaggcaacgtttgcagccttcataaaatgccgaagtgaaaaggctttcgccgggaccgataggatcggtgcagtcggagataatgacatcaaaggtctggctggtttgattaacgaaattgacgccatcgtcgatcaccagcttaaagcgcggatcgtcgtagctaccggcgttatggttgggtagatactgacggcagaacgacacgacacccgcatcgatttccaccatcgtgattgactcaacgtttttatgtcgggttacttcacgcagcatggcaccgtcgccgccgccgataatcagcacatgtttcgcgtgaccgtgggccagtagcggaacatgggtcatcatctcatgatagataaactcgtcgcgctcggtggtttgtactacgccatccagcgccattacgcgaccaaatgcagcgttctcaaaaatgatcagatcctggtgatcggtcttttcatgatacagagcgttatctaccgcaaagtactgtccaaactggtcgtgtagcgtttcatgccactgttttttttcggccatgggttgatacctcctttgttaacacccgtaaaaanagggcgcaacataatagctaacattgaccgcggatgcacggtcaatatttctacaaaaaggtatcagggattatttgacgtaggcaagcaggcttaaggaatcgcgagccagggccttgcactttttagcgacgggaatgccaatgccgctgagatcgcggtagctgtcttcaccgagagctttcatgtcgaaggtgtcgtaattactgagatcccactggttttgctgggcgaaaaagaccagtgcgcgacgaatttgcccgttaggtaagttctggtaaccacaatcgttcttcagaaagacaaaaactgccgttaaatcggccatatcttcggcttcagactcactgagcgcgtaactgtttgcgcaaacggccatcaggctgccgaataacactgttctgaaaaacgtcttcattgcttctaccaggggcttaaagaagataaacgttagcacactgcgagcgaggcgacgaccattattgtcgattaaattgtgtctgcggcttgaccttcccgtaaggggaaggactatgctcaacgtttgattttgtttcgcctgcttaagaataaggaaataactatgcaacgtcgtgatttcttgaaatattccgtcgcactgggtgtggcttcagccttgccactgtggagccgtgcagtctttgcggcggaacgcccaacgttaccgatccctgatttgctcacgaccgatgcccgtaatcgcattcagttaactattggcgcaggtcagtctacctttggcgagaaaactgcaactacctggggctataacggcaatctgctggggccggcggtgaaattacagcgcggcaaagcggtaacggttgatatctataaccaactgacggaagagacgacgttgcactggcacgggctggaagtaccgggtgaagtcgacggcggcccacagggaattattccgccaggtggcaagcgctcggtgacgttgaacgttgatcaacctgccgctacctgctggttccatccacatcaacatggcaagaccgggcgacaggtggcgatggggctggctggtctggtggtgattgaagatgacgagatcctgaaattaatgctgccaaaacagtggggtatcgatgatgttccggtgatcgttcaggataagaaatttagcgccgacgggcagattgattatcaactggatgtgatgaccgccgccgtgggctggtttggcgatacgttgctgaccaacggtgcaatctacccgcaacacgctgccccgcgtggttggctgcgcctgcgtttgctcaatggctgtaatgcccgctcgctcaatttcgccaccagcgacaatcgcccgctttatgtgattgccagcgacggtggtctgctacctgaaccggtgaaggtgaacgagctgccggtgctgatgggcgagcgttttgaagtgctggtggaggttaacgacaacaaaccctttgacctggtgacgctgccggtcagccagatggggatggcgattgcgccgtttgataagcctcatccggtaatgcggattcagccgattgctattagtgcttccggtgctttgccagacacattaagtagcctgcctgcgttaccttcgctggaagggctgacggtacgcaagctgcaactttctatggacccgatgctcgatatgatggggatgcagatgctaatggagaaatatggcgatcaggcgatggccggaatggatcacagccagatgatgggccatatggggcacggcaatatgaatcatatgaaccacggcgggaagttcgatttccaccatgccaataaaatcaacggtcaggcgtttgatatgaataagccgatgtttgcggcggcgaaagggcagtacgaacgttgggttatctctggcgtgggcgacatgatgctgcatccgttccatattcacggcacgcagttccgtatcttgtcagaaaatggcaaaccgccagcggctcatcgcgcgggctggaaagataccgttaaggtagaaggcaatgtcagtgaagtgctggtgaagtttaatcacgacgcaccgaaagaacatgcttatatggcgcactgccatctgctggagcatgaagatacggggatgatgttagggtttacggtataaaaagaccgtattcgggaatatgcccggatctctccgggcattaaactgatgacaaacgcaaatctgcctgatgcgctacgcttatcaggcctacgttacctgtgcaatccattgattttgcacaattttgtaggctggataaggcgttcacgccgcatccggcatgaacaacgcgcacgttgtcagcaatctgagcaagtcttacttcacatcatccggcagcgcataagccacaatatagtcacccatcttcgtaccaaatgaaccgtgaccgcctgcggagatcactacatactgcttaccattcacttcataggtcattggcgtcgcctgaccacccgctggtaaacgaccctgccacagtttttcaccgttgctcatgttgtaagcgcgcaggtagttatctgccgtagcggcgataaacagcacgttacccgccgtggagattggcccgcccagcatcggcatacccatattgaacggcaccggtacaggcatcgggaacggcatactgtcctgcggcgtaccaatacgtttcttccacaccacttcattagttttcagatccagcgccgagatataaccccatgctggctgtttacatggcagaccaaatggtgagaggaacgggttgagcgtgacaccatacggtacaccgtactgtggctgaatgccggattccgtacccgtgcctttggcatctttcggctgctccatcgggttacccggaccgcgtgggatcagtttcgaaacaaacggcagtgccattgggttnnnnattgccacttcacgatttggatcaacggaaatcccgccccattcaaacattcccaggttacccgggaagaccagcgtgccctgttcagatggcggcgtgaaaatgccttcatagcgcatctggtggaacatcacgcggcacaccagttggtcaaacatggtggctccccacatatccgcaccgctcaaatctttcgtcggacggaagctcagttccgagaatggttgagtaggggtaacgtaatcgcctttggcagcaccttggggaaccggtttttccggtgccggaaccaccagttcgccattacgacgatcgagcacaaaaatgttgccggttttcgccggagcgtaaataactggcactttctgaccattaacggtgatgtccgccagcgtcggctgtgccggaagatccatatcccacaggtcgtggtgaacggtctggtagctccacgccaatttcccggttgtggcattcagcgccagaatcgagctggcataacgttcctgttccggtgtgcggttaccgccccagatatccggcgtggtcacgcccatcggcagatacaccagatccagcttcgcgtcataggccgctggtgcccacgagtttggcgagttaaaggtaaaggtgtgttcgtcagacgggattgcgttcggatctttcgcgcccggatcaaaagcccacagcagctccccggtgttgacatcaaaaccacggatcacgccagacgtttcgcgggttgagaagttatcggtaactgaacctgccatcacgatggttttatcggtgataatcggtggcgaagtcggttcatacagacccggtttggtgtctggcatattgctttgcagattgagcacgcctttattggcgaaggtttcgcacagcttgccgttttcagcgttaatcgcaatcaggcgaccatcattgaccggaagaatgatacgacgcgggcaatccgccatcacttccggcgaagccgtttctgctttggcttcatgataagagacgccacggcaggttacgtgctggaaagactcgttagttttcagctcaggatcgtaatgccatttctctttgccgctggcggcatcgagcgcaaacaggcgctggtgagcggtacacaggtaaagggtgtcgcccactttaatcggcgtcacttcattggtgatttcgcccggatcgttcggctgcttcacatcgccagtacggaacacccaggcttctttcagattatggacgttatcggcgttaatttgtttcagaggtgaaaagcgttgaccttcctgattgcgaccataggcaggccagtcctgatcggcaacgggtgagatagcttccgcaggtgtggcatcggcgcttaaggtgccgttgatttcctgcggatcgttaaatccggcccaggtcaggatactaccgctaatcagcagtgccaccaccagtgcggcaactgcgccgctggcaggaatgaccaggcgacgccagacaaacggcaggatcagccagatgccgaagaagaccagaatatcgctgcgcggagtcagcgcccagaagtcgaaaccaacttcccagacgccccaaatcatggtgccgagcagcagggcggcgtatagccaaagcgcggcacgtttactgcgccacagcatccaggcgacgccgagcatcacaaggccagcgatagggtagtaccaggagccgccaatcgcgaccagccagcctccgccaatgagtagatacagcccgcaaagcgctgcaaaaagggctgttagcgtgacgagtaatcgtcgcgagcctgtattgttaattgccataaagagacaccatttcaattcattaatattttagtagcaattaattataggttttaacatgtgtgatcgtcatcacaatttgagctttattaacagattccgcgaatgaatcgttttgctggtatactgcgtgtcttgcgctttgttgcggtgccaaaacctgcccgtgcgaagtgatttgtttttaaatcatatggttagagatatgaaacatactgtagaagtaatgatccccgaagcggagattaaagcgcgtatcgccgaactgggtcgtcagattactgagcgttacaaagacagcggcagcgatatggtgctggtgggtctgctgcgtggctcatttatgtttatggcggacctgtgccgtgaagttcaggtatctcatgaagtcgactttatgaccgcctccagctacggtagcggcatgtccaccacccgtgatgtgaaaatcctcaaagatctggatgaagatatccgtggcaaggatgtgctgattgttgaagatatcatcgactcggggaatacactgtcgaaagtgcgtgagatcttaagcctgcgcgaaccgaagtcgttggcgatttgtacgctgctggataaaccgtcccgtcgtgaagtgaacgtcccggtagaatttatcggtttctcgatcccggatgagtttgtggtgggttacggcattgattacgcacagcgttaccgtcatctgccgtatatcggcaaagtgattctgctggacgagtaagtgtgaagttgccggatgtgttgcatccggcatggcatttttatttgtggttggcgtgtttcagcttgaggttggaaatcccgtgacggtaacgttgctcaagggtttcgcggttggtggcagtaacatccagatcacgcagcaagccgtcgtgaatgccataagcccagccgtgaatggtaactttctgcccgcgtttccacgctgattgcataatggtggagtggcccaggttatacacctgttccatgacgttcagttcacacaaggtatccagacggcgctcttgcggcatttcgtcgagcaatgagctatgtttgaaccagatatcgcggatatgcagcagccagttgttgataagccccagttccgggttttcaactgcggcttgtacgccgccgcaaccgtagtggccacagataataatgtgttcaacttcgagtacatccactgcatactgaaccacggaaaggcagttcaggtcggtgtgaatgaccaggttagcaacattacggtgaacaaagagttcgcccggctcaagaccggttaaacgttctgcaggaacgcgactgtcggaacatccaatccatagaaagcgcggtttttgcgcttgtgccagtttctcaaaaaacccgggatcctcttccaccagcatttttgaccatagtgcattgttgctgatgagtgtatctatgtctttcatggaggttaacgacctgtaaccaaataattacgtttggctaatatagggcaactccgggacgatttaaaccacagataaagtgtaagaacgtaaggtaagtaaaaatttatgaccattgcactggaacttcaacagcttaaaaaaaactatccaggcggcgttcaggcgcttcgtggaatagatttgcaggtcgaagcgggtgatttttatgcgcttctcgggccgaacggggccgggaaatcgaccactatcggtattatcagctctctggtaaataaaacctccgggcgggtcagcgtatttggttacgatctcgagaaagatgtcgtgaacgctaaacgtcagttgggactggtgccgcaggaatttaacttcaacccgtttgaaaccgtgcagcaaattgtggtgaatcaggcagggtactacggtgtggagcgcaaagaggcgtacatccgcagcgaaaaatatcttaagcagctcgatttatggggaaaacgcaacgaacgnnnncgcatgttatctggcgggatgaagcgccgtttaatgattgcccgtgcgttaatgcatgaacctaaactactgattctcgacgagccgactgcaggcgtggatattgaacttcgccgctcaatgtggggctttttgaaggatttaaacgacaaaggcaccaccatcattctcaccacacactacctggaagaagcagaaatgctgtgccgcaatatcggcattattcaacacggtgagctggtggaaaatacctcgatgaaggcgctgctggcgaagctgaaatcggaaacctttattctcgatctcgcaccgaaaagtccgttaccgaagctcgatggctatcagtatcgactggtcgataccgcgacgctggaagttgaagtgctgcgtgagcaggggatcaacagcgtatttacgcagttaagtgagcagggcattcaggtattaagtatgcgtaacaaagctaaccgtctggaagagctgtttgtttcactggttaatgaaaaacaaggagatcgcgcatgatgcatctttactgggtggcgctaaaaagcatctgggcgaaagagatccatcgctttatgcgtatctgggtgcagacgctggtgccgccagtcatcaccatgaccctttactttattattttcggtaacctgattggttcgcgtattggcgatatgcatggcttcagctacatgcagttcatcgtaccggggctgatcatgatgtcggtgatcaccaacgcctacgccaacgtcgcgtcatcattttttggtgccaagttccagcgtaatattgaagagctgctggtagcgccggttccgactcacgtcattattgccggatatgtcggcggtggcgtggcgcgtggtctgtttgttggcattctggtgacggcaatttcactgttttttgtgccgtttcaggtgcattcgtgggtattcgttgccttaaccctggtgctcacggcggtgttgttctcccttgcgggtttgctgaacggtgtgtttgccaaaacgttcgatgacatcagcctggtgccaacctttgtgttaacgccactcacgtatttgggtggggtcttttactcactgactttgttgccgccgttctggcaagggctgtcgcacctgaacccaatcgtttatatgatcagtggtttccgctacggcttcctcggtatcaatgatgttccgctggtcactacctttggcgtactggtggtctttattgtggcgttttatttgatctgttggtcgctgatccaacgtggacgtggtttgcgtagctaaggctatttcctctcctctggatttgggggagaggagttttgacggctatcaccctttatcaacaatggtcagggtagactgattttcggctaaggaggaaggcgatgttaggttgggtaattacctgtcacgatgaccgggcgcaagagatactggatgtgctggagaaaaaacatggggcgcttcttcagtgccgggccgtgaatttctggcgcggattaagttctaatatgctcagccgcatgatgtgcgatgctctgcatgaagcggactctggtgagggtgtnatcttcttaaccgatatagccggagcgccaccgtaccgcgtggcttcattattaagccacaaacactcccgttgcgaagtgatttctggtgtcacgttaccgttaattgaacagatgatggcttgccgtgaaaccatgaccagttcagagtttcgcgagcgtattgtcgaactgggtgcgccggaggtgagtagtatttggcaccagcaacaaaaaaatccgcctttcgtcctcaaacataatttgtatgagtattaacccgcgattctgatggcgcttttgctacaataaaagcgttgtttcaccctcggtgattttttcatgtacaaacaagctgttattctcctgctgatgctgtttaccgcaagtgtcagtgccgcgttacctgcccgttatatgcaaaccatcgaaaatgctgcggtctgggcgcaaattggtgacaagatggtgaccgtggggaatattcgggccggacaaatcattgccgtggagcccactgccgcaagttattacgcatttaattttggctttggtaaagggtttatcgataaaggtcatcttgagccggttcaggggcgacaaaaagttgaagacggtttgggtgacctcaacaagccgctgagtaatcagaacttagttacctggaaagatacgccggtctataacgcgccgagtgtgggcagtgcgccatttggggtactggcggacaatttgcgctacccgattttgcataaactgaaagacaggttaaatcaaacctggtatcagatccgtattggcgatcgactggcctatatcagcgcgctggatgcccaacccgataatggccttccggtgctaacctatcaccatattctgcgcgacgaagaaaacacccgttttcgccatacttcgacgaccacctcggtacgcgctttcaataaccagatggcctggctgcgcgacaggggatacgcgacactgagcatggtgcagctggaaggttacgtgaagaataagatcaatcttcctgcgcgagcggtggtgattacctttgatgatggcctcaagtcagtgagccgctatgcgtatcctgtgttgaaacaatatggcatgaaggcgacggcgtttattgttacctcgcgcatcaaacgtcacccgcagaagtgggaaccaaaatcgctgcaatttatgagcgtttctgagcttaacgaaattcgcgatgtatttgatttccagtcacatacccattttttgcatcgggtagatggttatcgccgacccatattactgagccgtagtgagcacaatattctgtttgattttgcacgttcacgtcgcgctctggcgccatttaatccgcatgtctggtatctttcgtatccgtttggcggctttaatgacaaagccgtgaaggcagcaaacgatgccggatttcacctggcggtgacaaccatgaaaggcaaagtaaaaccgggggataatccgttgttactaaaacgactttatatcttaagaacggattcgctggagacgatgtcgcggctggtgagtaaccagccgcagggataacaatcaagcaacctgtaccggaatcgctttcgcggtacgtttcatttcattgtcgccttcaaaataggcgacgttgggtcgccaggtgcgagcttcttcatctggcatggtaacgaagctggcgatgatgacaatatcgccgacactggcgcagtgggccgccgcaccgttaacagaaataattctcgaaccgcgttctgccgcgatggcataagtggagaaacgcttgccgttggtgacattccagatatcaatggcttcgttttcgagaataccggctgcgtcaagaaaatcctggtcaatggcgcaagaaccttcatagtgcaggtccgcatgagtcactttcacgcggtggagtttgccctgcagcatcgtgcgaatcataacttctacctttctaccctgtcgttaacgaagcagnnggtgcctgctttgaggaaattctcacgcagtattgcccgatttttgtttagtgtctactcatctgacggcatttgcatcagcagtttgcgtaccgcgccgaagcgtgcaatgtatcgcctgtaacgaattgatatttctctgaacgctgctcggtaaacaataaagaggtggctgacgatagcacgccttgactggatactgccttcacgcaagacaacacggaagacagggaagatggatgcaccgagtaccacaccgcatgacgcggtatttaaacaatttttaatgcatgcggagacggctcgcgactttctggagatacatttgccagtggaattacgcgaactttgtgacctcaacacgcttcatttagagtcggggagtttcattgaagagagccttaaaggacacagcacggacgtgctctattccgtgcaaatgcagggcaatcccggttatctgcatgttgtgattgaacaccaaagcaagccggataagaaaatggcctttcgcatgatgcgttattctatagccgccatgcatcggcatctggaggcggatcacgacaaactaccgctggtagtgccgattctcttttatcagggcgaggccacaccttatccgctctcaatgtgctggtttgatatgttttactcgccggagctggcgcgacgcgtctataacagtcctttcccgctggtggatatcaccatcacaccggatgacgaaatcatgcaacatcggcggattgcgattctcgaactactgcaaaaacatattcgccagcgcgacttaatgttattgctggagcaactggtcacgctgattgacgaagggtacactagcgaaagtcagttagttgccatgcaaaactatatgctgcaacgcggtcatactgaacaagcggatttgttttatggtgtgctgagagacagggaaacgggagggaagtctatgatgacgctggcacagtggtttgaagagaaagggattgagaaggggattcagcagggaagacaggaggagaggcaagaattcgcccagcgttttctgagtaaagggatgtctcgggaagacgttgcagagatgacaaatttatctcttgctgagattgataggctgattaactaagttgtctgcgttatgaataattgcttacagacgccatcgccatgacgtggggcaaattaataattggcgccatcagccgtagcgccagttatactcgtcatacttcaaattgcatgtgctgcgtctgcgttcgctaaccccagtcacttacttatgtaagctcctggggattaatgagagacatccatgtctctcaccgaaggccagcctgcggctgggcaaattcgttcctgacgaatttgtcactcgcttgccgccttcctgcaacttgcaacttgaattatttagagtataagtattacgccagctcgaccattttgttgtcgatcaggcgagcatcgccaagccaggcggctaccagaattactgcccgtttgctggtttcagagacttccagcaatgtgtcggcatcgcgaatctgaatatcatcggcgcggaagcctttttcattcagttcttgcccggcaatagcaataatttcatcgagatcccgttcgccagcctgcaatttgtcggcaatcgaacttaaaactttgtacagaccgggcgcaattttgcgttgttctgccgtcagataaccgttacgggaactcagtgccagaccgtctttggcgcgcataattggcacaccgacaatctcaatatcaaagcccatatcagcaaccattttgcggatcagcgccagttgctgaaagtccttttcaccgaagcaggcgatgtccggctggaccaggttaaacagcttgctgacgatagtcgacacgccgcgaaaatgccccggccggctggcgccttccagcatggtcgaaagccctggaacgtcaacgtaagtatgggtttcagtaccgttcgggtagatctcttttaccgagggcgcgaaaaccagatccactttgcgcttgttcagcttttcgcagtcttcctgcaaggtgcgtgggtaccgagccaggtcctccgggcggtcgaactgcatcgggttaacgaaaatactgacgacgaccacatcggcgcgggctttggcttcgtcgaccagcttcatgtggccatcatgcaggttgcccatggtaggtaccagcgccacgcgcttgccttccatacgcaggcggcgaatttgctggcgcagcagtggcagggtttcgataattaacacaacgtcactccttaatggaaactgtgttcttcgcccggataaacgccggactccacttcagccatatactgccgcacagcagcgcggatgtcgcccgtttcagcgaggaaatttttggcaaatttagggatatgaccgccggtaatgccgaacgcatcgtgcatcacgaggatctgcccatcggtaacgttgcctgcgccaataccgataaccgggatcgccagcgcttcggtaatacgttttgccagttcaaccggcacgcattccagcaccagcaactgtgcaccagcggcttctaaggctaatgcatcgctaagcagtcgatcgctcgcttcatcgccgcgcccctgaactttgtagccaccgaaaatattcactgactgtggggttaaacctaagtgaccacatacaggaacggcacgttcggtcagcatttttacggtttcgaccagccactcaccgccttcaattttgaccatgttagcaccggcacgcataaccgttgcggcgttttcaaaggcttgttccggcgtggcatacgccataaacggcaggtcagccaacagcaggcagtttggcgcgccacgacgtactgcggtagtgtggtaggcgatatcttcaacggtaacgggaagggtagattcatgcccctgaacggtcatccccagcgagtcgcccaccagcatcacgttcagcccttcctcggcaaacagttttgcgaagctgtagtcgtaggcggtgatggtggcgaagcgttttttttcctgcttacatttctgcaatgaagcaatggtggtcggtttcataacgtatcctgatggctaaagtcagattgatcgcattctaacagccgaaaacagggaggcaatggttattagtgtggggaaatgttcgcaccagagcagaactctggtgcgatgaggagggaatgacgttttacttattcgtaggtaaaggagaaggtcgcgttacctgaaaatgttccaacaccgacagcattaccgctaccatccggtaccagctgcgccgtaaaaggtaaaaacagcaggttgtttgaccaggcggcgaagttgtagtcaaccgtgttgctaccatctgcttttaacaatactttgctattgtcataagttgaatttacttttacagccacgcctgaagccgagccagtcgttttacccaccagtgtggcatcgctgggtttatttgccgctttcaacttaaccgtaattttactggcataacagtattcagcacggatagaaaaagggatttcccgcgtaagcccatttttcacttccgaaacatagctgttcccaagcgttacctgattgccactgacgttgccctgatcttgtgccagggcaactgttgcacaggtcggttcatcgacgaaaaactttaaagagtcattgtcaatgtaaaagttgatccacggctggtcattggtacctatataccatgacgcaatctttcctgctatcgttgttccgctggaaacaccattcttgggtttaaattcaggagttatgaataagcgaaaacgtaaataccaactttgatcactgtactcataggcccatttcgtctgggtgcttggtatgaagttatctgcgccactttgtgcaggtagccataaatcaagttcatctgcggcaccacaactaaggcataataactcgacagaatacacaatgcctggaacagttgtttttaataacgctgcgccattcgttgtggtgtacgtggatattaaacttgggtcagctgtattaagaaagtgaactgccttactatccccaagagatttacaccctatggcatcgcctcttagttgaatatttacatcccatgtagcttcggctatttctgtcggaacctcgaccatttgtgacgccagactaagctgagtagagcttatcttcatgtgataatccccttcagcatttctctctatataacattcattcgccaatgcataccaggatgtggtaaaaaatagcagtatcgcactgcataactgaatcaacagtttattgcctttcctttgcataattatccttattattcgtaagatacgttaacaataacctggcttctcaccattcccgattcaggaggaagggcattattcacccgctgcatacgggaataaaaggtccaggttgagggaacagcattgccaggtgctaccgaataaattgctgttgaggaaccatccgttcctcgcacgttaaatgtctgctgattcggttgggccgaaaaaatcacaatgccgacgtttttcgccccggtagcctgctgttcatattcattactaaaaatttgattattcacctgtgcaagcgatcccgcctgcggctgaaaatctaatttcatttgcgactgtgtcgtttgaatgttatcgcaagagaccacattcacattaaacgttttgccacccgcataatccgttgtcggggttacattgtcggcaaaatagtccagcgtcactgtgccgagatcgacaacgccattattactgacttcaacctgacaggtgctgggcacgatctttgcggtgagatccacatcctggccggaataggcaaaaggcgtgataagggctgttgccagccctaaaaagtgtacgattttatgatgcctgcatagcattctaatatccttatccgctattactgataagtgatcgtgaaagtcgtgggagagcggaaattacccggtcttacatcggttaccaatctaccttccgcaacggtcatccgtgcacttaacgggtaatcgtaaggctgagttgtggtgtcggcgggaagcgtcacaggcactggtatcttttgagcacaatggaattgcgtactgccattgctttccggtgtatctgtagtccatacttccacagccgttctggttgctgcgctagcgtcagtaaacttgttagaaaaacccgccgatgacgattgagaaccagcacaggatataccattaggtgccagcactatttgggcgctgttttggggaaggccagagcaattgctaaagcgaattttaaactgttgcactttgctttttgcaccgagttcagaaatataaacattgccaaagaccacttcattgatcactttattactattatccattatctgagcactgcaggtacccatagtcaggttactgtttacggttaaagaagcggacgttgtactcgcagaagcaaaattgctgttaaagcttacacccacggcaacagtagcaatcagtgtagcgatgacttttaatttcatggtggctgtccctgttattcgtaggtgaagttaaaggtggcttttgcctgaaacgcaccggtgngtcctgctcccgccgttgtttcgcgcagtgctacggtcagaggcacaccgctggctttctcatcggcgctccattcaaatttgtcagtattattgggtgtgaagaaagtcgagtctgcggtatctctacgcttaatccccatccccaccccagcagcgccagaggttgcttcattaacaattaacttaccggaaaccgttgttcctgtaagtgtggtaaaaatctttgagtaaccattgctgcaatcggaggcctttaatttaaagttggcctgagcttcgggcgcagcggtagcgactttatccagaccaacatcaggaattgtcaggctgtattcatcgttactaccggtcactgctggaccaccatcttccactatagttatcgtgcaggtggtggctaatacggtggccgtaaaatcgacattaagatctgttgcagagccaaccgccggtaaacccaggcctattaacgcggatgttagtagtatccttttcatagaattttccatattagtgatttgctacctgacaggtaagattgttaagtaataaggtgttggtgcttcccagcgtttgtggctgcgccgggaactggtagtgcaacttacagtcaatggtttggttgttttcataccagcgcacgattaattccccgctgtcgttaataccgcgtacaaatgcctgaccaccctggcccatgctgccgatcatcacctcaccctggtaaacctccgcagcaaacggaatggatttgccattggcggcagtaatattcagcacggcagaacgcccctcgtcagtttcgaaacgggtcaaaacaacggagccgctacgtggtacggtggtggcgctggtacttttcagttcaacatcgttttccagtgtttcaatgttcagacctacccggttttcacgatatgggctgacagaggacgtcacggcatatccccagcgatcgatttcgttattactgttattgattcgtgcgcctttagcacctggggcgttgattaacaccagcgtgtcgttactgctgaaactgttgttagtgaacgttaaaccaccactgtgtaatacaaagccgccatcggttgagatggagtactgctggctgttatcagaagtggccgaggccgaagcggaaataccgcctaacccagattcatagttgagataaccaccaacagaggctaaatcgccggngtttttatcgaggctataacctgcgttgacactgtagttcaccagattgttttcagtgttaccggaactgttaacattcaactgatgtgaaccatcgaaatcggtattgagctgagtatttaaattgcggaaaccagaagacttacgtttgccacctaaaatattctcaataggtacgctaacgctgacgtacatcgcgtcatctttctcgccgtcttcattccagctacgttgtaggttgacgctgaaactgccccacgaaacgcttttactgtaaccaacattatattcagtgcggctattgttcgccgcccagtaatacgtccagctaccggaaataaacagcgaaccgtaatcttcataggcgatattcaatggctggttaatgctgacggtaaactggtttttcatacgtgagtacgtctgcatggtgtttttgtcttcatcggcagacaaatgcttggcgtcgtcaatgaggactaacgcatcatgcaggcccaggtaatcctgggtggaatagcggtacgccgcgaggttaaatgatgtcccggtatcctggaaaagtttgttccaggtcacgcgataactttgcccctggtaggttttatcatccggaatttcagcacgggaatgggtaacgtctaccgcaaaggcgccgatgctggtgttgatacccacacctaacagcccggcaagatagttattatcggtgaactgaatgccggtataacccgtgaagaggttattcagaccatagtaataagaggcttgccccatattgggttcggatcgcagactgtcatcaatgactttacccgcgctgaaatcccaacggcccacaccaggacgttgcatttgtacaaccgacgagaagggttgcgtaaaggtgcgtttggaaccatccgcttcttcaatggtcacgaccagttcgctaccaaagccggaagggctaatgtcgtctataacaaattcaccgggcggaacggtggtttcataaattttatatccgctttgcgtcacggtgactttggcgttggagtttgctacaccgcggatggtcggagcgtaactggccagcgcngaaggcagcatacggctgtcgctgtacaggcgaacaccacggacgttgacagagtcaaacgtttcaccggtggtataggcatcacccataattatctgggaacggattgccggaatgtcacgctgtaagtaacgatcctggaaatcgaaatcgctgccgttatctgttgtccagttatagttaccgcgcgcacgaaagtgccaggctcctaaattgatacctgagttgaacgcgccatagacgctgtcactattgtcgttatctgaacttgtgtgatacgcgttcagggtatatgccagtgtggcagcgttaattcccgattcccataaagaagggtcaacgtagccgccatagcttttcagaacataggcctgagggatcgtcagatcgagaaactggtcactaccgtcaaagcgcacatccgccttttcgtatgactttgccagatccagacaatcctcttcttcaccttctctggcgagtaaagtgacaggctgttcaggttgcttaatgtgaagttgcgccaggtttttatgggtaagacaggccgccgcactgttttcgccaatatccacaaacggaatttctaagctggaagtcgcctgaccgtttacaaatacgcggacattatagagacccggcggtgtcgggttgccttgagcataacgtttaacatcaatcgttgatgcgccagttcccattaaaaaggaactgtcatattccacggtgtccgccgcagcaccgttgctgctataaaacagggcacaacaggccgcaagtagcgtttttttcgggatacggcttttttgatgagtaaactggtacaaggttgcattcctggcgatgttaaaaagaatccgtttattttttagaatgttgcggaaccatcaatgttgccgccaaagtcgttgatcgctttaaagaccacttttccggatgacacgcttcctggcagaccggttacgccaaagcttgcctggctgaacggcgtgaccatgctggaattgacgttgtaggttttgccgccgctttccagcttgacctcattaaaggacacgtaatatggcgttgggttatttgcctgtaactgagcgttgtttaatttccaggtgattttcgccggtgcttcagccggttctccctgtaacccactcaggcgataaaagagtttgatgcgtgtgcggaaagccagctgtaacaagtttttgtcagcctcagcatctttcggcttaggcggcacttccagcacgttaaaccagtagacgctttcacggtctttcggcagggctgttgcaccggtatacatcacttttacggtttgaccgcgttttggctccacgcgtgaaactggtggggtcgcggtaaacggcactttgatctggctgggatcggcattgtcatcgcccgtatccaaccagttctgaatcagtaaggggcgattccctttattttccagacgaacgttaacatcttttttatcagcgttataaatgatacgtgttccggaaataataatgtcagcgaatgctggtgcactggctaacagagtactcacaaataatgcactaaccgtttttttaaccaagggaaacataagcactccttgctgtctgtagaaagattaaattcgcgaaaataaggtttgcctgctggcaaaccttatgctcaacacaccatcaattacttataagcaacggtgtacagcgcgttagtggttacatgaccagcagttacagccgggctgttcggtgctttaacgtaagatgcgttaaatacgtactggcctttaccttctgcgtctaatgtcagttcctgaacttcagaagagttgttcatatggacctgcttaatttcagcagcgccagctttgtttttcatgttatgaactgcaatgtttacgttctgagccggtgcaataccgttaacagtgatgttcatattgttattcagggtaccgctggtgttcgcgtaacttgcagaacccatagttaactcagcattcttcggagcacctggatcacactcaacagaaatcatgaactctttcggcagtaaaccgacagcagttgcgctaacttcagcaaaagtatcagtaacattcgcagtatccagggtaaccacgccatcagtggtaacgctatgcataccagtatctaccacacccactttacaggtaccggactgtaccataccgttaaagtcgatatgaccaccatctacagccagggcggaaccagaagccataaccagagcggctgcgagaagtgcttttttcattacatgcatccttacaaaaattatatgaaattaatattgcgagcggatattactcaaagtttttggaggatgtaataggggggaattatcacgggtgtgaatatatttacgtggtgtattgaattgttgctattctaggttttttaaacaaaaaatgcctaatctatttgcatgaagtgctatttcatgaattaattaaaaaaaactaaaatgtaaattaagtatatttaatctgtaagaggggaagtgaggagtaagataagaaaataaaataatacagctaataccagatggcaggttgtagtactgctagcgaagtgagtatttcacgtaatgtctccccatcaggaaacacgagttccggggcaatctcaaacagcggccacagcataaagccgcgattcttcatatcgtaatgcgggacggtgagtcgttcggtattaatggtttcattaccaaacaacatgatatcaagatcgagtgtgcgcggtccccagcgttctgctttacgaacgcgaccttgctgcaactctatttgctgtgtgtgattaagtaattcttcaggcgcaagtgttgtttccagcgccacggctgcgtttaagtaatcgggttgatcttgcggccccagcggtggggtgcggtaaaacgaagaaacggtaagaatgtggctttcagggatatcgcctaatgctttcagggcagcattgacctgctccagcggagaggccagattgctgcctatggcaatatacgccactgtcatgcggtaccctcacgacgtggtgcgcgtttgcgtggacgacgagtacgacgacgcggtgacggttcttcatccagctcgttgagcatccctttttggtctggtggcgcggaaacctggaactcaccccaccatttcaccagacgctgcagttcagcgttacgctcaacttcagctcgcaaggccaacaggtcataagccgcacggaacttaggatgctccagcaatttccatgcgcgtttaccctgacgtcgggacatacgcaactgcaactgccagatatcgcgggttaacgtcgtcagacgtttcgggattgccagtgaacggcaggcttcgtccagcacgtcgttcatcgccagcgcgaaagcgtcgtgataggtcaggccgctttcctgggcgatcttctgtgccgtctccagcagtgggtaccagaacatagcggcaaacaggaacgccgggttcacgcgcatatcgttatggatacgcgnatcggtattcttcagcacctgttcaatgatccgctccatcgggctgtcgccattttccgtgaagtagcgggtaatggtcgggaacagcggctggaacagatgatattcacacaacagcttataggtttcgtaaccgtagcccgcttgtagcagtttaagcgattcttcaaacaggcgtgccggtgggatatcgttcagcagggtagcgaggcgagggatcggttctgcggtttccgggctgatgcgcatacccaatttggcggcaaaacgtactgcgcgcagcatacgtaccggatcttcacggtagcgcgtttccgggttaccaatcagacggataacaccgtccttcagatccttcataccgccaacgtaatcacggacggtaaaatccgctacgctgtaatacaggctgttgatagtgaaatcgcggcgctgggcgtcttcttcgatggagccgaaaatgttgtcgcgcagcaacatgccgttttgcccgcgttgggaggtcgtgcggtcgctgacgttaccttcgtggtgtccacggaaggtcgcaacttcgataatctccgggccaaacatcacatgagccagacggaaacggcgacccaccaggcggcagttacggaacagtttgcgcacctgctcaggcgtggcgttagtggttacgtcaaaatctttcggctttttgccgagtaacaggtcgcgcacgccgccgccaaccagccaggnttcgtatcccgctttattgagcctgtacattaccttcagggcattttcactgatatctttgcgggaaatagcatgctgctcacgcgggatcaccgtcacctgtggacgggcgactgcctgttcagcctcgctttcctcncggcttagcaccttgcggcaaaaattagcgactcgggtaaaaatagtacacctcggtagtgtcaaacatcattcaggacaaaaaaatagcggctaatcatagctcagcatgacgcatttgagaatgttgaatttacaattgccgactcaggcactgcggtaagccgccagtttttgacggctgactgaaggatttgctcgacgctgaaatcctgccagtgtgcttctgcctgctgccccagaaattgaagtgccgcgattagtaccgggcgtggatcgcctttcggcaacgcaggcgcatgattctgcttggaaagtttagcgccttgtggattaagcgccagcggcagatgaatgtaatctggcactttccagccaaaaagctggtacagcgagatttgccgcactgtcggttcgatcaaatctgccccgcggacaatttcgctcacgccctggaagtgatcatccaccaccaccgccaggttataggcaaacaaaccatcacggcgatgaataataaaatcttcccgtgccagtttttcgtcggcgtgaataatgccgcgcagctggtcagtaaattgcgtgaccggatgctgctggcggatacgcactgcggcgttgtctggtccatgatgcaacacccggcaatgaccgtcgtaaataccgccaatgctttgaatacgcgcacgcgtgcaggtgcagtaataacttagtccttgttcatgtaaccaggcgagtgcttcacgataggcgtggtgacgttgcgattgccagagaacatcgccgtcccagtgcagaccgtaatgttccagctggcgcaggatagtttctgcggcaccgggaacttcacgaggcgggtcgatatcttcaatgcgtaccagccagcgaccgtgccgggcgcgagcctgcaaatagctgccaagcgcagcaatcagagaaccaaaatgaagctcgccggaaggagagggggcgaagcggccaatatactgtgtgtctgtcatctctttgaacaaaaaataaggcgggagcatttcccgcctgtggtaaacgtgatggaacggctgtaattagccagccatctgtttttcgcgaatttcagccagcgttttgcagtcgatgcacagatcggctgtcgggcgcgcttccagacggcgaataccaatttcaacaccgcaggattcacagtagccgaaatcttcgtcttccacttttttcagcgtcttctcgatctttttgatcagcttacgctcgcgatcgcggttacgcagttcgaggctgaactcttcttcctgggctgcacggtctaccgggtccgggaagttggctgcttcatcctgcatatgtgtaacggtgcgatcgacttcatccctgagttgattacgccatgcttccagaatacgacggaagtgcgccagctgggcttcattcatatactcttcgcccggcttctcctgatatggttccaccccagcgatggcgagaatactcagggacgatgttttacggttttgcccttcttgcatgttgcttctccttaacacgcactatcgatccccatgttcgggggaaaaatgaggccgctataaatagcagatgcttttccggatagcaattatctaaacgtaacacttgacaactgtgtgaggaaaagcgtatttgcgcacgcgaccagaatgtaaattaaccagttacttactttactacaatgtaaccggcagtgattttttaagagccatgccttcagcagaaatttccnctttgtaagccagaatttctacccccctctgttgagcttctgacaatagttgcgcgtatttctcatcgatgtggcgcgcgggtgaaaaccgtgtaatggctgaatgcagcacggcgaaaaagataaccgcacgctggccttcagccgctacgctcatcaactcccgaaggtgtttctgacctcgttcagtgaccgcatcgggaaaatatccctgttcgttctccgctaacgtaaccgatttcacttcaatatagcagtctggacgcgaatccgcctgcaacataaagtcaatacggctgcgttctgcgccgtattttacttcgcttttcagcgagctatagcctgacagttctgaaattgattcattaaggatagcctctttcgtcaacctgttagcccaaagcgtgttgacgcaaataaatgcgccgctctggctttgagttaattcccaggtgtgtgggtatttccgtttggtgttgtctgaagtcgaataccagacggtatcgccaggcgttgcacaaccggtcatcgcacccgtattcgggcagtgtagcgttaattcgcgaccatcgggtgtgatcacatcggctaaaaaacgtttgtaacgctgaattagcgtcgcgcgctgtagagggggagaaaattccattgcgacaatccttgttattgcgttagcgcccagcgttttagcggcgtgtagcgtgtgcgtccacgggcaaacgaggaggcgtaaagggtgaactccgtcaccgcatatgaccagttaaaacctggcggcgggattgtcaccgcctcgctggcgtcgcgcaataaggtaatatgtggatgaaacggacgattgctttgaaaacaaccgctgcgggcagcctgtgaacggagcatattcgccagctggattaagccgcgtggcggctgacgcatccctaaccacaccacacgcgaacgcagccattggccggcgtcatcaagcgtgagtgtgaaaccaggttgacgaatccgtccggctaaaagagaaagcgccttctctttctctgcgctcacttcgcctaaaaatgccagagtcagatgcaaattatcggcggcgaccggacgtcccgcctcaagtgggaagtgtgtggcgcgccagtggataatctgttcgcggatttctgcaggtaagtcgatagcaaagaacagacgttgcgggtcagacatgtgaggcactcggttatgaattaccgcgatgctacaatgtggcgcgaagaatgttaaccctctggagcgttttgtgtcgtcgttgcccgttgctgccgtgttacctgaattacttaccgctctcgattatgcgccgcaggtattattaagtgcgccgaccggggccgggaaatcaacctggctgccgctgcaactgctggcgcatcccggcattaacgggaaaattatcctcctggagccacggcgtctggcggcgcgtaacgtcgcgcaacggctggcggagctgcttaacgaaaagccaggcgataccgttggctaccggatgcgtgcgcaaaactgcgtcgggccgaatacccgcctggaagtagttaccgaaggcgtgctgacgcggatgatccagcgtgacccggaactgagcggtgttggattggtgatccttgatgaatttcatgagcgtagcttgcaggcggatttggcgttggcgctgttactcgatgtgcaacaaggtctgcgtgatgaccttaaactgctgattatgtcggctacgctggacaacgaccgcttgcagcaaatgctgccagaagcgcccgtcgtcatctcagaagggcgctcgtttccggttgaacgccgttatttaccgctgcccacgcatcagcgttttgacgatgccgttgcggtagccaccgctgaaatgctgcgtcaggaaagcggatcattactgttatttttacctggcgtcggagaaattcagcgtgtgcaggaacaactggcttcgcgcatcggcagtgatgtattgctctgcccgctgtatggcgcgttgtcgctgaacgatcagcgaaaagcgatcctcccggcaccgcaagggatgcgcaaagtggtgctggcgaccaatattgctgaaaccagtttaaccattgaaggtattcgtctggtggtggattgtgcccaggaaagggtggcgcgttttgatccgcgaacagggcttacgcggttgattactcagcgaatcagtcaggcgtcgatgacgcagcgtgccgggcncgccgggcgtctggagccgggtatctgcctgcatttaatcgccaaagaacaagcagaacgcgctaccgcgcaaagtgaaccggagatcttacaaagcgatctttccggtttgctgatggaattactgcaatggggatgcagcgatccggcgcagatgagctggctggatcaaccgccaacggtgaatctactggccgcgaaacgtctgttacaaatgctgggggcgctggacggtgaacggcttagtgcgcaagggcaaaaaatggcagcgctgggtaacgatccgcgtttagcggcaatgctggttagcgcaaagagcgacgacgaagctgctaccgcggcaaaaattgccgccattctcgaagagccgccacggatgggcaatagtgacctgggcgtggcgttttcgcgcaatcaaccagcctggcagcaacgtagtcagcaactgttaaaacgcttaaacgtacgcggcggtgaggcagacagttcgcttatcgcgccgctacttgccggggcgtttgccgatcgcattgctcgccgccgtgggcaagatggacgctatcaactggcaaacggcatgggggcgatgcttgatgccgacgacgcgctaagtcgccacgaatggttgatcgcgccgttattattgcagggcagcgcctcgccggatgcgcggattttactggcgttaccggtcgatattgatgaattagtacaacgctgtccgcagctggtgcagcaatctgacaccgtggaatgggatgacgcgcaaggtacgctgaaagcctggcgtcggctgcaaatcggtcagttgacggtgaaagtgcagccgttggcgaaaccgtcagaagacgagttgcatcaggcgatgcttaacggcatccgtgataaaggtttaagcgtgctcaactggacggcggaagcggaacagctacgcttgcgtttgttatgcgccggaaagtggttgccagaatatgactggccagcggttgatgatgaaagtttgttggcgacgctggaaacgtggctgctgccacatatggccggtgtacattcactacgcggcctgaaatcactcgacatttatcaggcactacgcggattacttgattggggaatgcagcaacgtctggatagtgaattgcctgcgcattacactgtgccgacgggaagccggatcgccattcgttatcatgaagataacccgcccgcgctggcggtgagaatgcaggagatgtttggtgaggccactaatccgacgatcgcccaggggcgcgtgccgctggtgctggaattgctttcacccgcccaaaggccgctgcaaatcacgcgtgatttgggggccttctggaaaggggcgtatcgtgaggtgcaaaaggagatgaaagggcgttatcccaaacacgtctggccggacgacccggcaaacacggcaccgacgcgacggacgaaaaagtattcgtaaggttggttttctccctctccctgtgggagagggccggggtgagggcaccagcgcgcacgtacaccctcaccctaaccctctcccttaagggagaggggaccgatcgagctcaaattttgagagatatcttcttctgtcttgtaacagaagaacagaaaatcgggcttttgcgcctgaatattgcggagaaaaagcatggccgggaatgaccgcgagccaattggacgcaaagggaaaccgacgcgtccggtcaaacaaaaggtaagccgtcgtcgttacgaagatgacgatgattacgacgattatgatgactatgaggatgaagaaccgatgccgcgcaaaggtaagggcaaaggcaaagggcgtaagcctcgtggcaaacgcggctggctatggctgctgttaaaactggctatcgtttttgccgtgctgatcgccatttacggcgtttatctcgatcaaaaaattcgtagccgtattgatggcaaggtctggcaactgcctgcggcagtttatggtcgaatggtcaaccttgagccagacatgaccatcagcaagaacgagatggtgaagctgctggaggcaacacagtatcgtcaggtgtcgaaaatgacccgtcctggcgaatttaccgtgcaggccaacagcattgagatgattcgccgtccgtttgatttcccggacagtaaagaagggcaggtgcgcgcgcgtctgacctttgatggcgatcatctggcgaccatcgtcaatatggagaacaaccgtcagttcggtttcttccgtcttgatccgcgtctgatcaccatgatctcctcaccaaacggtgagcagcgtttgtttgtgccgcgcagtggtttcccggatttgctggtggatactttgctggcgacagaagaccgccatttctacgagcatgatggaatcagtctctactccatcggacgtgcggtgctggcaaacctgaccgcaggtcgcacggtgcagggggcgagtacgctgacgcaacagctggtgaaaaacctgttcctctccagcgagcgctcttattggcgtaaagcgaatgaagcctacatggcgctgatcatggacgcgcgttacagcaaagaccgtattcttgagctgtatatgaacgaggtgtatctcggtcagagcggcgacaacgaaatccgcggcttcccgctggcgagcttgtattactttggtcgcccggtagaagaattgagcctcgatcagcaggcgctgttagtcggtatggtgaaaggagcgtccatctacaacccgtggcgtaacccgaaactggcgctggagcgacgtaatctggtactgcgtctgctgcaacagcaacagattattgatcaagaactctatgacatgttgagtgcgcgtccgctgggggttcagccgcgcggtggggtgatctctcctcagccagcctttatgcaactggtgcgtcaggagcttcaggctaaattaggcgataaggtaaaagatctctccggcgtgaagatcttcactacctttgactcggtggcccaggacgcggcagaaaaagccgccgtggaaggtattccggcactgaagaaacagcgtaagttgagcgatcttgaaactgcgattgtggtcgtcgaccgctttagtggtgaagttcgtgcgatggtcggaggttctgagccgcagtttgcgggctacaaccgtgcgatgcaggcgcgtcgttcgattggttcccttgcaaaaccagcgacttatctgacggccttaagccagccgaaaatctatcgtctgaatacgtggattgcggatgcgccaattgcgctgcgtcagccgaatggccaggtctggtcaccgcagaatgatgaccgtcgttatagcgaaagcggcagagtgatgctggtggatgcgttgacccgttcgatgaacgtgccgacggtaaatctggggatggcgctggggctgcctgcggttacggatacctggattaaactgggcgtaccgaaagatcagttgcatccggttccggcaatgctgctgggggcgttgaacttaacgccaatcgaagtggcgcaggcattccagaccatcgccagcggtggtaaccgtgcaccgctttctgcgctgcgttcggtaatcgcggaagatggcaaagtgctgtatcagagcttcccgcaggcggaacgcgctgttccggcgcaggcggcgtatctgacactatggaccatgcagcaggtggtacaacgcggtacgggtcgtcagcttggggcgaaatacccgaacctgcatctggcagggaaaacagggactaccaacaataacgtagatacctggtttgcgggcattgatggcagcacggtgaccatcacctgggtcggccgtgataacaaccagccgaccaaactgtatggagccagcggggcaatgtcgatttatcagcgttatctggctaaccagacgccaacgccgctgaatcttgttccgccagaagatattgcagatatgggcgtggactacgacggcaactttgtttgcagcggtggcatgcgtgtcttgccggtctggaccagcgatccgcaatcgctgtgccagcagagtgagatgcagcagcagccgtcaggcaatccgtttgatcagtcttctcagccgcagcaacagccgcaacagcaacctgctcagcaagagcagaaagacagcgacggtgtagccggttggattaaggatatgtttggtagtaattaacatctaagcgtgaaataccggatggcgagttgccatccggtaaaataacatcccacccaaagtattaaccctttcttttcatctggttgtttattaacccttcaggaacgctcagattgcgtaccgcttgcgaacccgccagcgtttcgaatattatcttatctttataataatcattctcgtttacgttatcattcactttacatcagagatataccaatggcgcgttccaaaactgctcagccaaaacactcactgcgtaaaatcgcagttgtagtagccacagcggttagcggcatgtctgtttatgcacaggcagcggttgaaccgaaagaagacactatcaccgttaccgctgcacctgcgccgcaagaaagcgcatgggggcctgctgcaactattgcggcgcgacagtcagctaccggcactaaaaccgatacgccgattcaaaaagtgccacagtctatttctgttgtgaccgccgaagagatggcgctgcatcagccgaagtcggtaaaagaagcgcttagctacacgccgggtgtctctgttggtacgcgtggcgcatccaacacctatgaccacctgatcattcgcggttttgcggcagaaggccaaagccagaataactatctgaatggcctgaagttgcagggcaacttctataacgatgcggtcattgatccgtatatgctggaacgcgctgaaattatgcgtggcccggtttccgtgctttacggtaaaagcagtcctggcggcctgttgaatatggtcagcaagcgtccgaccaccgaaccgctgaaagaagttcagtttaaagccggtactgacagcctgttccagactggttttgactttagcgatgcgctggatgatgacggcgtttactcttatcgcctaaccggtcttgcgcgttctgccaatgcccagcagaaagggtcagaagagcagcgttatgctattgcaccggcgttcacctggcgtccggatgataaaaccaatttcaccttcctttcttacttccagaacgagccggaaaccggttattacggctggttgccgaaagagggaaccgttgagccgctgccgaacggtaagcgtctgccgacagactttaacgaaggggcgaagaacaacacctattctcgtaatgagaagatggtgggctacagcttcgatcacgaatttaacgacacctttactgtgcgtcagaacctgcgctttgctgaaaacaaaacctcgcaaaacagcgtttatggttacggcgtctgctccgatccggcgaatgcttacagcaaacagtgtgcggcattagcgccagcggataaaggccattatctggcacgtaaatacgtcgttgatgatgagaagctgcaaaacttctccgttgatacccagttgcagagcaagtttgccactggcgatatcgaccacaccctgctgaccggtgtcgactttatgcgtatgcgtaatgatatcaacgcctggtttggttacgacgactccgtaccgctgctcgatctgtacaatccggtgaataccgatttcgacttcaatgccaaagatccggcaaactccggcccttaccgcattctgaataagcagaaacaaacgggcgtttatgttcaggatcaggcgcagtgggataaagtgctggtcaccctgggcggtcgttatgactgggcagatcaagaatctcttaaccgcgttgccgggacgaccgataaacgtgatgacaaacagtttacctggcgtggtggtgttaactacctgtttgataatggcgtaacaccttactttagctatagcgaatcgtttgaaccttcttcgcaagttgggaaggatggtaatattttcgcaccgtctaaaggtaagcagtatgaagtcggcgtgaaatatgtaccggaagatcgtccgattgtagttactggtgccgtgtataatctcactaaaaccaacaacctgatggcggaccctgagggttccttcttctcggttgaaggtggcgagatccgcgcacgtggcgtagaaatcgaagcgaaagcggcgctgtcggcgagtgttaacgtagtcggttcttatacttacaccgatgcggaatacaccaccgatactacctataaaggcaatacgcctgcacaggtgccaaaacacatggcttcgctgtgggctgactataccttctttgacggtccgctttcaggtctgacgctgggcaccggtggtcgttatactggctccagctatggtgatccggctaactcctttaaagtgggaagttatacggtcgtggatgcgttagtgcgttatgatctggcgcgagtcggcatggcgggctccaacgtggcgctgcatgttaacaacctgttcgatcgtgaatacgtcgccagctgctttaacacttatggctgcttctggggcgcagaacgtcaggtcgttgcaaccgcaaccttccgtttctaatttctcttttggggcacggatttccgtgcccgtttcacaagttggctgttatgcaggaatacacgaatcattccgataccacttttgcactgcgtaatatctcctttcgtgtgcccgggcgcacgcttttgcatccgctgtcgttaacctttcctgccgggaaagtgaccggtctgattggtcacaacggttctggtaaatccactctgctcaaaatgcttggccgtcatcagccgccgtcggaaggggagattcttcttgatgcccagccgctggaaagctggagcagcaaagcgttcgcccgcaaagtggcttatttgccgcagcagcttcctccggcagaagggatgaccgtgcgtgaactggtggcgattggtcgttacccgtggcatggcgcactagggcgctttggtgcggcagatcgcgaaaaagttgaggaagctatctcgctggttggcttaaaaccgctggcgcatcggctggtagacagcctctctggcggcgaacgtcagcgggcgtggatcgccatgctggtggcgcaggatagccgttgtctgttgctcgacgaaccgacttcggcgttggatatcgcccaccaggttgatgtgctggcgctggtgcaccgtttaagtcaggagcgtggcctgacggtcattgccgtgctgcacgatatcaatatggctgcgcgttactgtgattatctggtcgccctgcgcggcggtgaaatgattgctcagggaacgcctgcggaaattatgcgcggcgaaaccctcgaaatgatttatggcatcccgatgggtattctgccgcatccggcgggtgctgcacctgtgagttttgtttattgatgagcggcttacctcttatttcgcgccgtcgactgttaacggcgatggcgctttctccgttgttatggcagatgaataccgcccacgcggcggctattgacccaaatcgtattgtggcgctggagtggctgccggtggaattactactggcgctcggcatcgtgccttatggcgtggcagacaccatcaactatcgactgtgggtcagcgaaccaccactacctgaatcggtgattgacgtcggtttgcgtacagaacctaacctcgaactgctgaccgaaatgaaaccgtcgtttatggtctggtcggcgggatatggtccttcgccagaaatgctggctcgtattgcgccggggcgtggatttaacttcagcgacggcaaacagccgctggcgatggcgcgtaaatcgctgacggaaatggcggatttacttaacctgcaaagcgcagcagaaacgcatttagcgcaatatgaagactttatccgcagcatgaacccccgctttgtgaagcgtggtgcgcgtccgttattgctgacgacgcttatcgatccgcgccatatgctggtcttcggtccaaacagcttgttccaggaaattcttgatgagtacggcatcccaaatgcctggcaaggggaaaccaacttctggggcagtaccgccgtcagcatcgatcgtctggcagcgtataaagacgttgatgtgctctgttttgatcacgacaacagcaaagacatggatgcgctaatggcaacgccgctgtggcaggccatgccgtttgtccgcgccnnacnctttcagcgcgtacccgcagtctggttttatggtgcaactctctcggcaatgcactttgtgcgcgttctggataacgccattggaggtaaagcgtgagtaaacgtattgcgcttttcccggcattattgctggcgttgctggtgattgccgctacggcgctgacctggatgaacttctcgcaggcgctgccgcgtagccagtgggcgcaggctgcctggtcgccggatattgacgtcatcgagcagatgatttttcactacagcttgctgccgcgtctggnaatttcgctgctggtgggcgcaggcctggggctggtgggcgtgctgtttcagcaagtgctgcgtaatccgctggcggaaccgacgacacttggcgttgctacaggcgcgcaactggggattaccgtcactacgctctgggcgatcccaggggcgatggcgagtcagtttgctgcgctggcgggcgcttgcgttgttggcttaatcgtctttggcgtcgcgtgggggaaacggctttcgccggtaacgctgatcctcgcggggctggtagtgagcctttattgtggggcaatcaatcagttactggttatcttccaccatgaccaactgcaaagcatgttcctgtggagcaccggaacgctgacgcaaaccgactggggcggtgttgagcgtttatggccgcagttgctgggcggtgtgatgctgacgttgctgctacttcgtccgttaacactgatggggcttgatgatggcgtggcgcgcaatctcgggctagccttgtcgctggcgcgtctggcggcgctgtcgctggctattgtcatcagtgcgctgctggtgaacgcggtggggattatcggctttatcgggttgttcgcgccgttgctggcaaaaatgctgggggcgcggcgtctgctgccgcgactgatgctggcgtcgttgattggtgcgctgatcctctggctttccgatcaaatcatcctctggctgactcgcgtgtggatggaagtgtccaccggttcggtcactgcgttgatcggtgcgccgctgctactgtggctgttgccgcgtttacgcagcattagcgcgccggatatgaaggtcaacgatcgtgtcgcggctgaacgccaacatgtgctggcgtttgccctcgcgggcggcgtgctgctgttgatggctgtggtggtggcgctgtcgtttggtcgtgatgcgcacggctggacgtgggcgagcggggcgttgctcgaggatttgatgccctggcgctggccgcgaattatggcggcgctgtttgcgggcgtcatgctggcggtggcgggctgtattattcagcggctgaccggaaacccgatggcaagcccggaagtgctggggattagctctggcgcggcgtttggcgtggtactgatgctgtttctggtaccgggtaatgcttttggctggctgttacccgcgggaagtatcggtgcggcggtgacgctgttgattattatgatcgccgccgggcgcggtggattttccccacaccgcatgttactggcggggatggcgttaagtaccgcattcaccatgcttttaatgatgttgcaggcgagtggtgacccgcgaatggcgcaagtgctgacctggatctctggttcgacctacaacgccaccgatgcgcaggtctggcgcaccggaattgtgatggtgattttgctggcgattaccccgctgtgccgccgctggctgaccattttaccgctgggtggtgataccgcgcgggccgtgggggtggcgttaacgccgacgcgaattgcgctgctgctgttagcggcttgcctgacggcgaccgcgacgatgaccattggaccgttgagttttgttggtttaatggcaccgcatatcgcgcggatgatgggctttcgacggacgatgccgcacatcgtgatttcggcgctggtgggtggtttactgctggtgttcgctgactggtgtgggcggatggtgctgtttccgttccagatcccggnggggctgctgtcgacctttatcggcnnnncnnattttatctatttgttgagaaagcagagccgttaataaaatgcctcgcccggtgggcgaggcaaaatcatcacaacttcgcaaacacccgacgtgcagcatcgatggtgttattgatatcttccatgctgtgcgccacagacataaagcccgcttcaaacgctgacggtgccaggtaaacaccttcatccagcatcatatggaagaaacgcttaaaacgctcgacgtcacaggccatcacatcctgatagcacgtcacggactcggcgtcggtaaagaaaataccgaacatgccgccaacgtggtttaccaccagcggaattccggcttcttctgccgcttccagcagaccttctgccagacgtgttgtcagctcatccagcgtttcgtgaacgcccggctgcgcgacttcattcagacaggcgaaaccggctgccatcgcaatcgggttaccggaaagcgtacccgcctgatagaccggacccgtcggggccagcgcatccattacatcacgacgaccaccgaatgcgcctaccggcattccaccgccgatgattttgcccaggcaagtgagatccggttccacaccgtaataatcctgtgcgccagctagcgctacgcggaaaccggtcatcacttcatcgatgatcagcaacgcgccaaattcgtcgcacagcgmgcgcagacctggcaggaagtctggcagcggtggaacacagttcatattgcctgccaccggctcgacgataatacaggcaatctcttgcgggtattgctcaaacgcggcgcgtacagaagccagatcgttataagtacaggttaaggtatgtttggcgaaatctgccggaacgcccggcgagtttggctggcctaacgtgagtgcgccagagccggctttcaccagcaggcagtcagcgtgaccgtggtaacaaccttcaaatttaataattttgtcgcgaccggtaaaaccacgggccaggcggatggcgctcattgtcgcttcagtgccggagttcaccatgcgcaccatatccatggtcgggaccagttcggtcaccagttgcgccattttcacttccatttcggttggtgcaccaaagcttaaaccacgctcggcggcttcaatcacggcattgcggatcgccggatggttatggcccagcaccatcggcccccaggaaccgacataatcgatataggctttgccatcaacatcgtacagataagcgccgtccgctttttcgataaacagtggagtgccgcccacgccagtaaaggcgcgaacaggggagttcacaccgccagggatcagctcgcgcgctgcgctgtaaagattttcagacttactcatggagggttcctgattcgtagaaaaagtgaatggctgctattctatgttattcataacaagttaaatactcgtcaaacatcaggctgcttgtactggtgcaatcctgatttcttagagtataaaagttttgtgcatttgaaacattacgctttgcaaaggattttcatggaacgtgcgagtaaaatgccgtcatcttatttgtatgaccaataagtgatcattggatgaaaactgatactccctctttagaaacaccgcaggccgcgcgcctgcgacgcagacaactgattcgccaacttcttgagcgcgataaaaccccgttagccattttgtttatggcggcagtcgtcggcacgcttgtcgggctggcagcggttgcttttgacaaaggtgtcgcctggttgcagaaccaacgtatgggggcgctggtacatactgctgataattatccgctactgttaaccgttgcttttctctgttcggcggtgctggcgatgttcggctactttttggtgcgcaaatacgcgcccgaagcaggggggtcggggatcccggaaattgaaggggcgctggaagatcaacgtcctgttcgctggtggcgtgtattgccggtgaaattctttggcgggctggggacactcggcggaggcatggtgttggggcgcgaagggccaaccgtgcagatcggcggtaatatcgggcggatggtactcgatgttttccgcctgaaaggtgatgaagctcgccatacgctgttggcaaccggtgcggcggcgggtctnnnnnnnnnnnnnnacgcgccgctggcgggtattttgtttattatcgaagagatgcgtccgcagtttcgctatacgttaatttcgattaaagcggtatttattgncgtcattatgtcgaccattatgtaccggatttttaatcatgaagttgcgttgattgacgtcggtaaactttctgacgcgccgcttaatacgctgtggctttatctgatcctcggtattatttttggcattttcggccctatttttaataaatgggtgctggggatgcaggatttgctgcaccgtgtgcacggcggcaatattaccaaatgggtactgatgggtggtgcgattggcggtctgtgtggattgctggggtttgtggcaccagcaacgtcgggcggcggttttaacctgattcctatcgctaccgcggggaatttcagcatgggaatgctggtgtttatcttcgtcgcgcgggtcattaccaccttactctgcttctcttccggcncgccgggcggtatttttgccccgatgctggcgctgggtactgtgctgggaaccgctttcggaatggttgccgttgagctgtttccgcaatatcaccttgaggcggggacgtttgctattgccggaatgggggcgttactggcggcatctattcgcgcgccgttaacggggatcattctggttctggagatgaccgataactaccagctcattttgccaatgattattaccggtcttggcgcaacactattagcgcaatttaccggcgggaaaccgctatactcggcgattcttgcgcgcacgctggcaaaacaggaagctgagcaactggcgcgaagcaaggccgcatcagccagcgagaatacttgaacgaaataccagggtattagataatggcgattattattgggttagaatttgcccaattgccgatgtcgtttggagcaaaatatgagtgatgacgtagcactgccgctggagtttaccgacgcagcagccaacaaagttaaaagcctgatcgctgacgaagataacccgaatctgaaattacgcgtgtatatcaccggtggcggttgcagcggcttccagtatggtttcacctttgatgatcaggtgaacgaaggcgatatgaccatcgaaaaacagggcgttggcctggtggttgatccgatgagcctgcaatatctggtcggcggttccgttgactataccgaaggactggaaggttctcgtttcatcgtgaccaacccgaacgcgaaaagcacctgcggttgcggttcttcctttagtatctaatctgttgttcatgtgccggataaactatccggcacatcttctctcttcaacgcccattctcatccagcgcaaacgtcggtagcttaagatgccaacgaatagccgccagccgaatcaatagcgtcacgaccatgcccatcatactggctgtttccagtggtacggaaaatgtgtaataagccgtagcgtggacaataccgccgataatacaggcagttgcgtagatttctgtacgtaaaatcatggggatttcgcgggccagaacatcacgaatgatcccgccgccaacgccagtaatgacgcccatacaaaccgcgattaacggaccggcttccgcattaaaggctttattcacgccaatgccgacaaacaccgccagaccaacggcgtccagcaccggcaacatccattttggtaagcgtcttggctggcgcaccagcacgatggtcagcatgctggttaccattgcaacgaccagatcggtgggatctttcacccaaaataccgggccgtgatccagcgccatgtcgcgaattgtcccgccgcctacagcggtaaccacgcccagtaccagaacaccaaaagggtccatacgcaattttccggctaacaaaacgccggagatggcaaataccgctgtgccgactatatccagccaatagacgagcattgttcaatccccactgagcacctaaaaaggtcaggcgctaatctacctgtgaaagcgcattacagagctgttgtgcagcgaggataatacgtgggcttgcacgttcaaaccagtcactcgtgagaggaataacgggaattttgagctgttcaccccagtattgtttgattttaggaatttggtccggtccgcctgtaatgacaatcgcctgtggcgagcgtgctaacacctgttcgcggctaacttgcggccagggaacccggctgtctttaaagatgttttctccgccacaaacttcgagtacctggttttgaatcgactcttttccactggtaaatggcggattaatgccgaattgcagaaaaacacgttttttaggtttatcagcatattgcgctttcaattgcgcgtattgatccagcagggattgcgcggcttgttcggccttatccggttgcggactccagggagccagttgacgtaacgcattggcaatttgttcaatgcttgtcgcatcgacccacatcacttttattcccagcgaagccagctggtcaacctgccgctcggcattacctccacgccaggcaatcaccagatcgggtttcagcgcgacaatgcgttccagattcatcccctgccaggtggaaacctgctcaatcttttgcgcttgtggaggatagtcggaatagctgctgaccccaaccggcgtgatcccggcggcaaaggcaagttcagtgttggcgggagaaagcgtgatgacgcgcggcgcggcgttgagccacagtggcgcaagaaaagacagggcgaccagcgccctgaacagtgacttagccatgtgccagtttctgcactagtgactcaaccatcaggctggactgtttagcggcaacagccaggaactcatcgaagctaagatgagactgttgatcggccacgtcggagatggcgcgtacgacaacaaacgggacgttgaaattgtggcagacatgggcgattgccgtcgcttccatctctacagcaatggcctgtgggaagttgtggcggattttcgccagaccaacagaaccgttgatgaaagcgtcgccgctaacaatcaggccacgtacagcgttaagattcagttcggcaatgcaggcctcagcggcagcgatcagtttatcgtcagctttaaagcctgccggacagcctggtaactgaccgtattcataaccaaatgccgtgacatccgcgtcgtgataacgcgcttcgtccgagacaacgatatcgcccactttcagcgttggtgccaggccaccggcagaaccggtgttaataatcacatctggcttgcagtgttccaacagcagagtggcacccagcgccgcagcgactttaccgatgcccgatttcagaagcgcaacctcggttccattcagttggccggtatagatttcgcaaccgcccagactgatagtttgacggttttcgattttgtcacgcagcagcgtaacttcttcttccattgcaccaatgatgccgattttcatagatttactcgcgataagcccgatttgaaggcatagtttaccatgcgcttacggggaagcgtatttctcacgcgggagaggacatggcacagattgatttccgaaaaaaaataaactggcatcgtcgttaccgttcaccgcagggcgttaaaaccgaacatgagatcctgcggatcttcgagagcgatcgcgggcgtatcatcaactctccggcaattcgtcgtctgcaacaaaagacccaggtttttccactggagcgcaatgccgccgtgcgcacgcgtcttacccactcgatggaagtccagcaggtggggcgctacatcgccaaagaaattttaagccgtctgaaagagcttaaattgctggaagcatacggcctggatgaactgaccggaccttttgaaagcattgttgagatgtcatgcctgatgcacgatatcggcaatccgccgtttggtcattttggcgaagcggcgataaatgactggtttcgccagcgtttgcacccggaagatgccgaaagccagcctctgactgacgatcgctgcagcgtggcggtactacgtttacgggacggggaagaaccgcttaacgagctgcggcgcaagattcgtcaggacttatgtcattttgaggggaatgcacaaggcattcgtctggtgcatacattgatgcggatgaatctcacctgggcgcaggttggcggtattttaaaatatacccgtccagcgtggtggcgtggcgaaacgcctgagacacatcactatttaatgaaaaagccgggttattatctttctgaagaagcctatattgcccggttgcgtaaagaacttaatttggcgctttacagtcgttttccattaacgtggattatggaagctgccgacgacatctcctattgtgtggcagatcttgaagatgcggtagagaaaagaatatttaccgttgagcagctttatcatcatttgcacgaggcgtggggccagcatgagaaaggttcgctcttttcgctggtggttgaaaatgcctgggaaaaatcacgctcaaatagtttaagccgcagtacggaagatcagttttttatgtatttacgggtaaacaccctaaataaactggtaccctacgcggcacaacgatttattgataatctgcctgcgattttcgccggaacgtttaatcatgcattattggaagatgccagcgaatgcagcgatcttcttaagctatataaaaatgtcgctgtaaaacatgtgtttagccatccagatgtcgagcagcttgaattgcagggctatcgggtcattagcggattattagagatttatcgccctttattaagcctgtcattatcagactttactgaactggtagaaaaagaacgggtgaaacgttcccctattgaatctcgcttattccacaaactctcgacgcgccatcggctggcctatgtcgaggctgtcagtaaattaccgtcagattctcctgagtttccgctatgggaatattattaccgttgccgcctgctgcaggattatatcagcggtatgaccgacctctatgcctgggatgaataccgacgtctgatggccgtagaacaataaccaggcttttgtaaagacgaacaataaatttttaccttttgcagaaactttagttcggaacttcgcgctataaaacgaatctgaagaacacagcaattttgcgttatctgttaatcgagactgaaatacatgaaaaaaaccacattagcactgagtgcactggctctgagtttaggtttggcgttatctccgctctctgcaacggcggctgagacttcttcagcaacgacagcccagcagatgccaagccttgcaccgatgctcgaaaaggtgatgccttcagtggtcagcattaacgtagaaggtagcacaaccgttaatacgccgcgtatgccgcgtaatttccagcagttcttcggtgatgattctccgttctgccaggaaggttctccgttccagagctctccgttctgccagggtggccagggcggtaatggtggcggccagcaacagaaattcatggcgctgggttccggcgtcatcattgatgccgataaaggctatgtcgtcaccaacaaccacgttgttgataacgcgacggtcattaaagttcaactgagcgatggccgtaagttcgacgcgaagatggttggcaaagatccgcgctctgatatcgcgctgatccaaatccagaatccgaaaaacctgaccgcaattaagatggcggattctgatgcactgcgcgtgggtgattacaccgtagcgattggtaacccgtttggtctgggcgagacggtaacttccgggattgtctctgcgctggggcgtagcggcctgaatgccgaaaactacgaaaacttcatccagaccgatgcagcgatcaaccgtggtaactccggtggtgcgctggttaacctgaacggcgaactgatcggtatcaacaccgcgatcctagcaccggacggcggtaacatcggtatcggttttgctatcccgagtaacatggtgaaaaacctgacctcgcagatggtggaatacggccaggtgaaacgcggtgagctgggtattatggggactgagctgaactccgaactggcgaaagcgatgaaagttgacgcccagcgcggtgctttcgtaagccaggttctgcctaattcctccgctgcaaaagcgggcattaaagcgggtgatgtgatcacctcactgaacggtaagccgatcagcagctttgccgcactgcgtgctcaagtgggtactatgccggtgggcagcaaactgaccctgggcttgctgcgcgacggtaagcaggtcaacgtgaatctggaactgcagcagagcagccagaatcaggttgattccagctccatcttcaacggcattgaaggcgctgagatgagcaacaaaggcaaagatcagggcgtggtagtgaacaacgtgaaaacgggcactccggctgcgcagatcggcctgaagaaaggtgatgtgattattggcgcgaaccagcaggctgtgaaaaacatcgctgaactgcgtaaagttctcgacagcaaaccgtctgtgctggcactgaacattcagcgcggcgacagcaccatctacctgttaatgcagtaatctccctcaaccccttcctgaaaacgggaagggggtctccttacaatctgtgaacttcaccacaactccatacatcttcatcatcctttaggcatttgcacaatgccgtacgttacgtacttccttatgctaagccgtgcataacggaggacttatggctggctggcatcttgataccaaaatggcgcaggatatcgtggcacgtaccatgcgtatcatcgataccaatatcaacgtaatggatgcccgtgggcgaattatcggcagcggcgatcgtgagcgtattggtgaattgcacgaaggtgcattgctggtactttcacagggacgagtcgtcgatatcgatgacgcggtggcacgtcatctgcacggtgtgcggcaagggattaatctaccgttacggctggaaggtgaaattgtcggcgtaattggcctgacaggtgaaccagagaatctgcgtaaatatggcgaactggtctgcatgacggctgaaatgatgctggaacagtcgcggttgatgcacttgttggcgcaggatagccgtttgcgggaggaactggtgatgaacctgattcaggcagaggagaatactcccgcacttactgaatgggcgcaacggctggggatcgatctcaatcaaccgcgagtggtggctattgttgaggtcgacagcggtcagcttggtgtggacagcgcaatggcggagttacaacaactgcaaaacgcgctgactacgcccgagcgtaataatctggtggcgattgtctcgctaaccgaaatggtggtgttgaaaccggcgttgaactcttttgggcgctgggatgtagaagatcatcgtaagcgagttgaacaactgattacccgcatgaaagagtacggccagctgcgttttcgcgtttcactgggcaactattttaccggtcctggcagtattgcccgatcctatcgtacggcgaaaacgacgatggtggtgggtaaacagcggatgccagaaagtcgctgctatttttatcaggatctgatgttacctgtgttactcgacagtttgcgtggcgactggcaggccaacgaactggcgcgaccgctggcgcggctgaaagcgatggacaataacggcttgctgcgacgaacgctggcggcgtggtttcgtcacaatgtgcaaccgctggcaacgtcaaaggcgttgtttattcatcgtaataccctggagtatcggcttaatcgtatatcggaactgaccgggcttgatttgggcaattttgatgacaggttgctgctgtatgtggcgttacaactggatgaagagcggtaggttatgcgttaaggttgaggcggcgctggctcattcccctcagcccgaaggggagaggggaatgcccgagttaaccgtcaattcgggattatttacgcgttagtttttccagatcggcttcaatctcgctgatcttattggttacgactgactccaggtgacgtaagtcgtcgaggatcttacgcttaagatcaacttcgctgcggtcacgctggcagatttgatcaagctcatcaatgatataccgtagattcgggctgatttcctggacttctttataaccctgacccacaccatcagcgacgaccgttttacgctgacgcggatatttaaacttaacgctcttggcgaaaaactcgcctttgtctttctggaaatagattttcagaatatcgttgttggcttcctgccggaggctgtaacgatcaatttcttcaggattggtaatacccagacttttcagattgtcgtacatagcgttacctcaaaatgagtcagtaaaatgtgcttattttagcatttggcctggcccgcccggctcgactgtgatcgcagaaagcctttttcttccagacttctatcatggcgtaaaaatcaaaaaattacctgctttattgtggcgatattccatgggatggattagcacatttatcttcgttttgcgaattacatgacagtccgaaacaagatgaaaaagtatttaaaaaaggggggaggaagaatgagtaggacgaattattctgaaccagaaagcaatcgggcagcgtcgtgctgcccgtgtgcatacttttagtcgatggtacgcagcagttcgttaatgccgactttgccgcgagttttcgcgtcaactttcttaacgataaccgcacagtagaggctgtatttgccatctttcgacggcagattacctgaaacaaccacagaccccgccggaacgcgaccgtagtggatttcgccggtttcacggtcgtaaatacgggtgctctgaccaatgtatacgcccatggaaatgacggaaccttcttcgacaatcaccccttcaactacttcagagcgcgcgccgatgaagcaattatcttcaatgatggttgggttagcctgcagcggttccagcacaccgccgatgcccacgccaccggaaaggtggacgtttttaccaatctgcgcacaagaaccgacggtcgcccaggtatcgaccatggtgccttcatcaacatatgcgccgatgttgacgtaagacggcatcagcacggtgttacgggcaataaacgcaccctgacgtaccgccgcaggtggtacaacgcggaagccttctttctggaaacgtgcttcgtcgtagtcggcgaatttcatcggcactttgtcgaagtagcggctttctgccccttcgatcacctgattatcattaatacggaaagagagcagcaccgcttttttcaaccactgatgcgtcacccactgaccgtcaattttttccgctacacgcagtgcgccggaatccagcagggcgatcacctgatttaccgcttcgcgggtaacggtgtctgcattggctggcgtgatctcggcacggcgttcaaaagcggtttcaataatgttctgtaactgctgcattgttaaactcttttcatatcagtaaacacatcaccctttatcgtttggattgagggcctctgtcaaccgctgatgcacttcctgctgcaactcgttattaagtgcacgccggtcagcggtggcaattatgaataaatcttctactcgctcgccaatggttgtaattcgggcaccatgaagcgaaattcccagatcggcaaaaattttcccgactctcgccagcagtcctggctggtcgagcgcgataagctcaaggaacgatttgcggtcggtatgggttggcaaaaacgtcacttcggtttcaacagtaaagtgacgtagtttagccggttgacgacgcggctgtggtggctgccagctactttgtgtcagtacttgctccagaccaaaccgaataacctcatgacgatctgcggatagcgggctaccatcgggttccagcacgataaaggtatccatcgccataccgtcgcgagtggtgaaaatttgtgcgtcgtgaacgcttaagttgcgtctatctaactcggcacaaacagcagcaaacaagtaagggcggtccgggctccagataaaaatctcggtgcctccacgcgtagcctgcgggctaagcaataccagcggtttgcttaaatcatgctgtaataaatggcgcgcatgccaggccagttgatttgggctatgacggacaaaatagttcgcgcgacagcgtgaccaaattnnnngcagcacctcttcgtcgatgttatccatgcgcagtagtgccagcgcctggagttggtgatggcgaacccgttcgcgcatatccggcgtgttttgcattccgcgtcgtagctgcttttcggtggcgaaatagagttcgcgcaacagactttgcttccagctattccacagcgtttcgttggtggcgcaaatgtcagccactgtcaggcataccagatagcgcagacgattttccgtttgaacttcttcggcaaactgcttgatgacttccgggtcctgaatatcgcgacgctgagctgtcaccgacatcagcaagtgctggcgaaccagccaggcgaccagctgtgtttcgcgtgagttcagcccgtggagttcggcaaaatgcactacatcctgagcaccgagaatagagtggtcgccgccgcgtcctttggcgatatcgtgaaacagcgcggcgatgaaaatcagctcagttgacggtaggcgcggccagacgttcacacacaacggatggcgctggcgcgtttcttcactggcaaaactctccagtttcagcatcacgcggatagtatgttcatccaccgtgtaggcgtggaacagatcaaactgcatctgcccgacgatatgtgaccattgcggcatatacgcgccgagtacgctatggcgatgcattggcaatagcccgcgccgcaccgctccggggtgacgtagaatgctcaaaaacagttttcgtgcttgcggaatattacacagcggttgttgcagatggcgacgggcatggcgtaactggcgcagtgtggtggagtaaatgccggtgatcgcactgttgcgcaccatggtgtagaacatacgcaagatggcttccggctggcgcataaatagtgtttcatcacgcaggtcgattagcgtaccgcgtagctgaaactcatcgtcgattggacgtggtttttcgtcggcgggaagggcgaggatggcttcatcgaacagttgcagcagcatctggttgagttcactgacgcggcgtgtcacgcggaagtaatccttcatcatccgctcgaccggttcgttaccttcgccactgtaattcagacgctgggcgacgctaagctggcgatcgaataacaggcgattatcgtaacggctgacgaccagatgcagggcaaagcgaatacgccacaatatatgcagacattcgtttaattccgcccgctccgctgaggttaagaagccaaacccaaccatttcatccagcgatgttgcgccaaaatgacggcgggccacccattgcagagtgtggatatcgcgcaagccgccagggctacttttgatgtctggttcaagattgtagctggtgccgtggtaacgctgatggcgctggttctgttcttcaactttcgccgcgtagaacttgtcggaaggccagaatccttcgctgaaaatatgtttttgcagttcaagaaatagcgcaacatcgccaattaataagcgggattcgatcaaattggtggcgacggttaaatccgataacccttccagcatgcactcttcaagcgtgngcacactatgaccgacttccagctttacatcccagagcagcgttaacagctcgcccactttttgcgcctgatcgtccgggagctttttacggcttaaaatcagtaaatcgatgtcagaaagtggatgcagctcgccacgaccgtagccaccgacggcgaccaatgccaggtcggcaatctggctgaatcccgcttcaatccataatcgttgcaggagctggtcgataaactcggtgcgcgcctcaatcaactgttctgcagagatcccattgtcaaaggcatcacccagccaacgctggaaagtatcgatatgggcttttatcccaccgacggttaattcatcacggggccagacgcatggattttgcggttgaccgggcagggtggggagagcggtgtttgcgtactgttctggaagggtattcattgtgcgccacccataagattaaattatcgcattaaaaaagccggcattcgccggcttcattttattcgtcgtgcgagattatcgccgggatggtgtcatccttgcgtagcgtcagaatttcgcagccgttatcagtcaccacaatagtatgctcatattgtgcagacaagctgcgatctttggtttttaccgtccagccatctttcatggtgcggatctcttttttacccgcgttgaccattggctcgatggtgaacgtcatcccaggtttcagtacgacgttggtttcacgggagtcatagtgcagcacctgcggttcttcatggaagccgcgaccaataccgtgtccgcaatattcacgaacgacggagaagccttctgcttcgacaaatttctgaatcgccgcaccgatttcgcgcagattaatgcctggttttaccatgcgtagcgccaggtacaggctttcttgcgtgatacggcacagacgttcgcccatgatggtcggcttaccgacgataaacattttcgaggtatcgccgtggaaaccatctttgattacggtgacatcaatgttaacgatatcgccatctttcagcagcttagcatcgtccggaataccgtggcacaccacttcattaatagaaatgcaaacggatttcggataaccgtgatagccgaggcaggctgaaaccgcgtgttgttcattaacaatgtaatcattacagatgcgatccagctcgccggtgctgacgcccggtttaacatatggttcgatcatctccagcacttcggcagccagtcggccagcgacgcgcattttttcgatatcttctggggtcttgattgagatagccattaattctgtccatcagcgtcggtgataccgacaatatatatgtaagtgccgtcaatggtatcacacccgggcaaattgagaatcattctgaatttcgccaaacgtgccactgaaggttttctataatagaaaattcgacgtctgatgctgtacacagcgccaacaattattggtgtccacggcgtatttgtggtataaagcgcgccggacttccgatccatttcgtatacacagactggacggaagcgacaatctcactttgtgtaacaacacacacgtatcggcacatattccggggtgccctttggggtcggtaatatgggatacgtggaggcataaccccaacttttatatagaggttttaatcatggcaactgtttccatgcgcgacatgctcaaggctggtgttcacttcggtcaccagacccgttactggaacccgaaaatgaagccgttcatcttcggtgcgcgtaacaaagttcacatcatcaaccttgagaaaactgtaccgatgttcaacgaagctctggctgaactgaacaagattgcttctcgcaaaggtaaaatccttttcgttggtactaaacgcgctgcaagcgaagcggtgaaagacgctgctctgagctgcgaccagttcttcgtgaaccatcgctggctgggcggtatgctgactaactggaaaaccgttcgtcagtccatcaaacgtctgaaagacctggaaactcagtctcaggacggtactttcgacaagctgaccaagaaagaagcgctgatgcgcactcgtgagctggagaaactggaaaacagcctgggcggtatcaaagacatgggcggtctgccggacgctctgtttgtaatcgatgctgaccacgaacacattgctatcaaagaagcaaacaacctgggtattccggtatttgctatcgttgataccaactctgatccggacggtgttgacttcgttatcccgggtaacgacgacgcaatccgtgctgtgaccctgtacctgggcgctgttgctgcaaccgtacgtgaaggccgttctcaggatctggcttcccaggcggaagaaagcttcgtagaagctgagtaataaggcttgataactcccccaaaatagttcgagttgcagaaaggcggcaagctcgagaattcccgggagcttacatctgtaagtgaccgggatgagcgagcgaagatgacgcatctgcggcgcgaaatatgaagggggagagcccttatagaccaggtagtacacgtttggttagggggcctgcatatggccccctttttcacttttatatctgtgcggtttaatgccgggcagatcacatctccgaggattttagaatggctgaaattaccgcatccctggtaaaagagctgcgtgagcgtactggcgcaggcatgatggattgcaaaaaagcactgactgaagctaacggcgacatcgagctggcaatcgaaaacatgcgtaagtccggtgctattaaagcagcgaaaaaagcaggcaacgttgctgctgacggcgtgatcaaaaccaaaatcgacggcaactacggcatcattctggaagttaactgccagactgacttcgttgcaaaagacgctggtttccaggcgttcgcagacaaagttctggacgcagctgttgctggcaaaatcactgacgttgaagttctgaaagcacagttcgaagaagaacgtgttgcgctggtagcgaaaattggtgaaaacatcaacattcgccgcgttgctgcgctggaaggcgacgttctgggttcttatcagcatggtgcgcgtatcggcgttctggttgctgctaaaggcgctgacgaagagctggttaaacacatcgctatgcacgttgctgcaagcaagccagaattcatcaaaccggaagacgtatccgctgaagtggtagaaaaagaataccaggtacagctggatatcgcgatgcagtctggtaagccgaaagaaatcgcagagaaaatggttgaaggccgcatgaagaaattcaccggcgaagtttctctgaccggtcagccgttcgttatggaaccaagcaaaactgttggtcagctgctgaaagagcataacgctgaagtgactggcttcatccgcttcgaagtgggtgaaggcatcgagaaagttgagactgactttgcagcagaagttgctgcgatgtccaagcagtcttaattatcaaaaaggagccgcctgagggcnnnnnnnnnttgtgcccatcttgtaaattcagctaacccttgtggggctgcgctgaaaagcgacgtacaatgtcgctagtattaattcatttcaatcgttgacagtctcaggaaagaaacatggctaccaatgcaaaacccgtctataaacgcattctgcttaagttgagtggcgaagctctgcagggcactgaaggcttcggtattgatgcaagcatactggatcgtatggctcaggaaatcaaagaactggttgaactgggtattcaggttggtgtggtgattggtgggggtaacctgttccgtggcgctggtctggcgaaagcgggtatgaaccgcgttgtgggcgaccacatggggatgctggcgaccgtaatgaacggcctggcaatgcgtgatgcactgcaccgcgcctatgtgaacgctcgtctgatgtccgctattccattgaatggcgtgtgcgacagctacagctgggcagaagctatcagcctgttgcgcaacaaccgtgtggtgatcctctccgccggtacaggtaacccgttctttaccaccgactcagcagcttgcctgcgtggtatcgaaattgaagccgatgtggtgctgaaagcaaccaaagttgacggcgtgtttaccgctgatccggcgaaagatccaaccgcaaccatgtacgagcaactgacttacagcgaagtgctggaaaaagagctgaaagtcatggacctggcggccttcacgctggctcgtgaccataaattaccgattcgtgttttcaacatgaacaaaccgggtgcgctgcgccgtgtggtaatgggtgaaaaagaagggactttaatcacggaataattcccgtgatggataaataagggtaagattccgcgtaagtatcgcgggggatcttacccgtaatatgtttaatcagggctatacttagcacacttccactgtgtgtgactgtctggtctgactgagacaagttttcaaggattcgtaacgtgattagcgatatcagaaaagatgctgaagtacgcatggacaaatgcgtagaagcgttcaaaacccaaatcagcaaaatacgcacgggtcgtgcttctcccagcctgctggatggcattgtcgtggaatattacggcacgccgacgccgctgcgtcagctggcaagcgtaacggtagaagattcccgtactctgaaaatcaacgtgtttgatcgttcaatgtctccggccgttgaaaaagcgattatggcgtccgatcttggcctgaacccgaactctgcgggtagcgacatccgtgttccgctgccgccgctgacggaagaacgtcgtaaagatctgaccaaaatcgttcgtggtgaagcagaacaagcgcgtgttgcagtacgtaacgtgcgtcgtgacgcgaacgacaaagtgaaagcactgttgaaagataaagagatcagcgaagacgacgatcgccgttctcaggacgatgtacagaaactgactgatgctgcaatcaagaaaattgaagcggcgctggcagacaaagaagcagaactgatgcagttctgatttcttgaacgacaaaaacgccgctcagtagatccttgcggatcggctggcggcgttttgctttttattctgtctcaactctggatgtttcatgaagcaactcaccattctgggctcgaccggctcgattggttgcagcacgctggacgtggtgcgccataatcccgaacacttccgcgtagttgcgctggtggcaggcaaaaatgtcactcgcatggtagaacagtgcctggaattctctccccgctatgccgtaatggacgatgaagcgagtgcgaaacttcttaaaacgatgctacagcaacagggtagccgcaccgaagtcttaagtgggcaacaagccgcttgcgatatggcagcgcttgaggatgttgatcaggtgatggcagccattgttggcgctgctgggctgttacctacgcttgctgcgatccgcgcgggtaaaaccattttgctggccaataaagaatcactggttacctgcggacgtctgtttatggacgccgtaaagcagagcaaagcgcaattgttaccggtcgatagcgaacataacgccatttttcagagtttaccgcaacctatccagcataatctgggatacgctgaccttgagcaaaatggcgtggtgtccattttacttaccgggtctggtggccctttccgtgagacgccattgcgcgatttggcaacaatgacgcccgatcaagcctgccgtcatccgaactggtcgatgggacgtaaaatttctgtcgattcggctaccatgatgaacaaaggtctggaatacattgaagcgcgttggctgtttaacgccagcgccagccagatggaagtgctgattcacccgcagtcagtgattcactcaatggtgcgctatcaggacggcagtgttctggcgcagctgggggaaccggatatgcgtacgccaattgcccacaccatggcatggccgaatcgcgtgaactctggcgtgaagccgctcgatttttgcaaactaagtgcgttgacatttgccgcaccggattatgatcgttatccatgcctgaaactggcgatggaggcgttcgaacaaggccaggcagcgacgacagcattgaatgccgcaaacgaaatcaccgttgctgcttttcttgcgcaacaaatccgctttacggatatcgctgcgttgaatttatccgtactggaaaaaatggatatgcgcgaaccacaatgtgtggacgatgtgttatctgttgatgcgagcgcgcgtgaagtcgccagaaaagaggtgatgcgtctcgcaagctgaggataatccggctacagagagtcgcgctatttgttagcgtagggcttcagtgatatagtctgcgccatctgatcgtaagtagttggctttataaggtcaggtatgccgtggttttacanggctnttttttgtataggcttcagtattcctgagtaccgtaaaccctgtcagggaataaaaaacgcgtgatgttgtctgctactcaaccacttagcgaaaaattgccagcgcatggctgccgtcatgttgcgatcattatggacggcaatggtcgctgggcaaaaaagcaagggaagattcgtgcctttgggcataaagccggagcaaaatccgtccgccgggctgtctcttttgcggccaacaacggtattgaggcgttaacgctgtatgcctttagtagtgaaaactggaaccgaccagcgcaggaagtcagtgcgttaatggaactgtttgtgtgggcgctcgatagcgaagtaaaaagtctgcaccgacataacgtgcgtctgcgtattattggcgataccagtcgctttaactcgcgtttgcaagaacgtattcgtaaatctgaagcgctaacagccgggaataccggtctgacgctgaatattgcggcgaactacggtggacgttgggatatagtccagggagtcaggcaactggctgaaaaggtgcagcaaggaaacctgcaaccagatcagatagatgaagagatgctaaaccagcatgtctgtatgcatgaactggcccctgtagatttagtaattaggactgggggggagcatcgcattagtaactttttgctttggcaaattgcctatgccgaactttactttacagatgttctctggcccgatttcgatgaacaagactttgaaggggcgttaaatgcctttgctaatcgagagcgtcgtttcggcggcaccgagcccggtgatgaaacagcctgatgggggtcgcttttgctgaagtatcgcctgatatctgcttttgtgttaatacccgtcgtcatcgcggcgttgtttctgttgccgccggtggggttcgccattgtaacgctggtggtctgcatgctggcagcgtgggaatggggacagcttagcggttttaccactcgttcgcagcgagtatggttggcggtgttatgcgggttattgttggcgctgatgctttttctgttgccggaatatcaccgaaatattcatcaaccgctggttgaaatctcactttgggcttcgctgggttggtggattgtcgcgctattgctggtgctgttttacccaggttccgcagcaatctggcgtaactctaaaacattgcgccttatttttggcgtgctaaccattgttcccttcttctggggcatgctggcgttacgggcctggcactatgacgagaatcattacagtggcgcaatatggctgctctatgtcatgatcctggtatggggcgctgactccggcgcatatatgtttggcaaattgtttggtaaacataagctggcaccgaaggtttctccgggtaaaacctggcaaggctttatcggtggactcgctactgcagcggtaatctcatggggttatggcatgtgggcgaatctcgacgtcgctcccgtcaccttactcatttgctctattgtcgcagcgttagcctcagtgctcggcgatctgaccgagagtatgtttaagcgtgaagcaggaattaaggacagcggtcatttaattccaggacacggtggtattttagatcgtattgatagcctgacggctgcggtaccggtctttgcttgcttgttgttactggtattcaggacgctttaacggaaggtaatatgctgagttttctctgggatttggcttcgttcatcgttgcactgggtgtacttatcaccgtgcatgaatttggtcatttctgggttgcccggcgttgtggtgttcgcgttgagcgtttctcaatagggtttggtaaggcgctctggcggcgaactgataagctcggcaccgaatatgttatcgccctgatcccgttgggcggttatgtcaaaatgctggatgagcgcgcagaaccggtcgttccggaactccgccaccatgccttcaataataaatctgtcggccaacgagcggcgattattgccgcaggtccggttgcaaacttcatttttgctatctttgcctactggctggtttttattattggtgtgcctggcgtacgtccggtggttggcgaaatagcagccaattcgatagctgcggaagcacaaattgcaccaggtacggaactaaaagccgtagatggtatcgaaacgcctgattgggatgccgtgcgtttgcagttggtcgataaaattggcgatgaaagcaccaccattacagtagcgccatttggcagcgaccaacggcgggatgtaaagctcgatttacgtcactgggcgtttgagcctgataaagaagatccggtatcttcgctggggattcgtcctcgtgggccgcaaattgaacctgtactggaaaatgtgcagccaaactcggcggcaagcaaggcaggtttgcaagcaggcgacaggatcgttaaagtcgatggtcagcccttaacgcagtgggtgacctttgtgatgcttgtccgggataacccgggtaaatccttagcgttagaaatcgaaaggcaggggagtcccttgtctttgacattaatcccggagagtaaaccgggtaatggtaaagcgattggttttgtcggtattgagccgaaagtcattcctttgccagatgagtataaagttgtacgccagtatgggccgttcaacgccatcgtcgaagccacggacaaaacgtggcagctgatgaagctgacggtcagtatgctgggaaaattgatcaccggtgatgtgaaactgaacaacctcagtgggccgatctctatcgccaagggggctgggatgacagcggaactcggggtagtttattacctgccgtttcttgcgcttattagcgtgaacttagggataattaacctgtttccgttgcccgtacttgacggggggcatctgctgttccttgcgatcgaaaagatcaaaggcggaccggtatccgagcgggttcaagacttttgttatcgcattggctcgattctgctggtgctgttaatggggcttgcacttttcaatgatttctctcggttatgagagttagttaggaagaacgcataataacgatggcgatgaaaaagttgctcatagcgtcgctgctgtttagcagcgccaccgtatacggtgctgaagggttcgtagtgaaagatattcatttcgaaggccttcagcgtgtcgccgttggtgcggccctcctcagtatgccggtgcgcacaggcgacacggttaatgatgaagatatcagtaataccattcgcgctctgtttgctaccggcaactttgaggatgttcgcgtccttcgtgatggtgatacccttctggttcaggtaaaagaacgtccgaccattgccagcattactttctccggtaacaaatcggtgaaagatgacatgctgaagcaaaacctcgaggcttctggtgtgcgtgtgggcgaatccctcgatcgcaccaccattgccgatatcgagaaaggtctggaagacttctactacagcgtcggtaaatatagcgccagcgttaaagctgtcgtgaccccgctgccgcgcaaccgtgttgacctaaaactggtgttccaggaaggtgtgtcagctgaaatccagcaaattaacattgttggtaaccatgctttcaccaccgacgaactgatctctcatttccaactgcgtgacgaagtgccgtggtggaacgtggtaggcgatcgtaaataccagaaacagaaactggcgggcgaccttgaaaccctgcgcagctactatctggaccgcggttatgcccgtttcaacatagactctacccaggtcagtctgacgccagataaaaaaggtatttacgtcacggtgaacatcaccgaaggcgatcagtacaagctttctggcgttgaagtgagcggcaaccttgccgggcactccgctgaaattgagcagctgactaagatcgagccgggcgagctgtataacggcaccaaagtgaccaaaatggaagatgacattaaaaagcttctcggtcgctatggttatgcctatccgcgcgtacagtcgatgcctgaaattaacgatgccgacaaaaccgttaaattacgcgtgaacgttgatgcgggtaaccgtttctacgtgcgtaagatccgttttgaaggtaacgatacctcgaaagatgccgtcctgcgtcgcgaaatgcgtcagatggaaggtgcatggctgggaagcgatctggtcgatcagggtaaggagcgtctgaatcgtctgggcttctttgaaactgtcgataccgatacccaacgtgttccgggtagcccggaccaggtagatgtagtctacaaggtgaaagaacgtaacactggtagcttcaacttcgggattggttacggtactgaaagtggcgtgagcttccaggctggcgtgcaacaggataactggttaggtacaggttatgctgttggtatcaacgggaccaaaaacgattaccagacctatgctgaactgtcggtaaccaacccgtacttcaccgtagatggcgtaagcctcggtggtcgtctcttctataatgacttccaggcagatgacgccgacctgtccgactataccaacaagagttatggtacagacgtgacgttgggcttcccgattaacgaatataactcgctgcgtgcaggtctgggttatgtacataactccctgtccaacatgcagcctcaggttgcgatgtggcgttatctgtactctatgggtgaacatccgagcacctctgatcaggataacagcttcaaaacggacgacttcacgttcaactatggttggacctataacaagcttgaccgtggttacttcccgacagatggttcacgtgtcaacctgaccggtaaagtgaccattcctggatcggataacgaatactacaaagtgacgttagacacggcgacttatgtgccgatcgatgacgatcacaaatgggttgttctggggcgtacccgctggggttatggtgatggtttaggcggcaaagagatgccgttctacgagaacttctatgccggtggttccagcaccgtgcgtggcttccagtccaatacaattggtccgaaagcagtttacttcccgcatcaggccagtaattatgatccggactatgattacgaatgtgcgactcaggacggcgcgaaagacctgtgtaaatcggatgatgctgtaggcggtaacgccatggcggttgccagcctcgagttcatcaccccgacgccgtttattagcgataagtatgctaactcggttcgtacttccttcttctgggatatgggtaccgtttgggatacaaactgggattccagccaatattctggatatccggactatagtgatccaagcaatatccgtatgtctgcgggtatcgcattacaatggatgtccccattggggccgttggtgttctcctacgcccagccgttcaaaaagtacgatggagacaaggcagaacagttccagtttaacatcggtaaaacctggtaagtgttctccacaaaggaatgtagtggtagtgtagcgatgactttaggcgatcaatataaatcgccgggccacgcaaagaactgcaccctccggtgcaaatgggatggtaaggagtttattgtgaaaaagtggttattagctgcaggtctcggtttagcactggcaacatctgctcaggcggctgacaaaattgcaatcgtcaacatgggcagcctgttccagcaggtagcgcagaaaaccggtgtttctaacacgctggaaaatgagttcaaaggccgtgccagcgaactgcagcgtatggaaaccgatctgcaggctaaaatgaaaaagctgcagtccatgaaagcgggcagcgatcgcactaagctggaaaaagacgtgatggctcagcgccagacttttgctcagaaagcgcaggcttttgagcaggatcgcgcacgtcgttccaatgaagaacgcggcaaactggttactcgtatccagactgctgtgaaatccgttgccaacagccaggatatcgatctggttgttgatgcaaacgccgttgcttacaacagcagcgatgtaaaagacatcactgccgacgtactgaaacaggttaaataagtaatgccttcaattcgactggctgatttagcgcagcagttggatgcagaactacacggtgatggcgatatcgtcatcaccggcgttgcgtccatgcaatctgcacaaacaggtcacattacgttcatggttaacccaaaataccgtgagcatttaggcttgtgccaggcgtccgcggttgtcatgacccaggacgatcttcctttcnnnnaaagtgccgcgctggtagtgaagaatccctacctgacttacgcgcgcatggcgcaaattttagataccacgccgcagcccgcgcagaacattgcacccagtgcggtgatcgacgcgacggcgaagctgggtaacaacgtatcgattggcgctaacgcggtgattgaatccggcgttgaactgggcgataacgtgattatcggtgccggttgcttcgtaggtaaaaacagcaaaatcggtgcaggttcgcgtctctgggcgaacgtaaccatttaccatgagatccagatcggtcagaattgcctgatccagtccggaacagtggtaggcgcagacggctttggttatgccaacgatcgtggtaactgggtgaagatcccacagattggtcgcgtaattattggcgatcgcgtggagatcggtgcctgcactaccatcgatcgcggcgcgctggatgacactgttattggcaatggcgtgatcattgataaccagtgccagattgcacataacgtcgtgattggcgacaatacggcggttgccggtggcgtcattatggcgggcagcctgaaaattggtcgttactgcatgatcggcggagccagcgtaatcaacgggcatatggaaatatgcgacaaagtgacggttacgggcatgggtatggtgatgcgtcccatcactgaaccaggcgtctattcctcaggcattccgctgcaacccaacaaagtctggcgcaaaaccgctgcactggtgatgaacattgatgacatgagcaagcgtctgaaatcgcttgagcgcaaggttaatcaacaagactaacgttccatcttttgttcgccaaactttacggcctgtctcattcttacgattgcggcaggccgtgttattattgtcgtttcttatattttgacaggaagagtatcttgactactaacactcatactctgcagattgaagagattttagaacttctgccgcaccgtttcccgttcttactggtggatcgcgtgctggattttgaagaaggtcgttttctgcgcgcagtaaaaaatgtctctgtcaatgagccattcttccagggccatttccctggaaaaccgattttcccgggtgtgctgattctggaagcaatggcacaggcaacaggtattctggcgtttaaaagcgtaggaaaactggaaccgggtgagctgtactacttcgctggtattgacgaagcgcgcttcaagcgcccggtcgtgcctggcgatcaaatgatcatggaagtcactttcgaaaaaacnnnnnnnngcctgacccgttttaaaggggttgctctggtcgacggtaaagtagtttgcgaagcaacgatgatgtgtgctcgtagccgggaggcctgatacgtgattgataaatccgcctttgtgcatccaaccgccattgtggaagagggcgcgtcgattggcgcgaacgcacacattggtcctttttgtatcgttggaccccatgtcgaaattggtgagggtaccgtactgaaatctcacgttgtcgtgaatggtcatactaaaattggccgcgataatgagatttatcagttcgcctccatcggcgaagttaaccaggatctgaaatatgctggcgaaccgacccgcgtggaaatcggcgatcgtaaccgcattcgcgaaagcgtcaccattcatcgtggcacagtccagggcggtggattgacgaaggtgggcagcgacaacttactgatgatcaacgcgcacattgcgcacgattgtacggtaggtaaccgctgtattctcgccaacaacgcaacgctggcgggtcacgtatcggttgacgacttcgcgatcatcggcggcatgaccgcagtccatcagttctgcatcattggtgcgcatgtgatggttggcggctgctccggtgtggcgcaggacgtccctccttatgtcattgcgcagggtaaccacgccacgccgttcggtgtcaatatcgaagggctgaagcgccgcggattcagccgtgaggcgattaccgctatccgcaatgcgtataagctgatttatcgtagcggtaaaacgctcgatgaagtgaaaccggaaattgctgaactggcggaaacatatccggaagtgaaagcctttaccgatttctttgcacgctcaacgcgcggtctgattcgttaatgactgaacagcgtccattaacgattgccctggtcgccggagaaacctccggcgatatcctgggggccggtttaatccgcgctctgaaagaacgtgtgcccaacgcccgctttgttggtgttgccgggccacgaatgcaggctgaaggctgcgaagcctggtacgaaatggaagagttggcggtgatgggcattgttgaagtgctcggtcgtctgcgtcgcttactgcatattcgtgccgatctgacaaagcgttttggtgaactaaagccagatgtttttgttggcattgatgcgcctgacttcaatattaccctcgaaggtaaccttaaaaagcagggtatcaaaaccattcattatgtcagtccgtccgtctgggcgtggcgacagaaacgcgttttcaaaataggcagagccaccgatctggtgctcgcatttctgcctttcgaaaaagcgttttatgacaaatacaacgtaccgtgccgctttatcggtcataccatggctgatgccatgccattagatccagataaaaatagtgcccgtgatgtgctggggatcccttacgatgcccactgtctggcattgttgccgggcagccgtggtgcagaagtcgaaatgcttagtgccgatttcctgaaaacggcccagcttttgcgccagacatatccggatctcgaaatcgtggtgccactggtgaatgccaaacgccgcgagcagtttgaacgcatcaaagctgcagtcgcgccagacctgtcggttcatttgctggatggaatgggccgtgaggcgatggtcgccagcgatgcggcactactggcgtcggggacggcagctctggagtgtatgctggcgaaatgcccgatggtggtgggatatcgcatgaagccttttaccttctggttggcgaagcggctggtgaaaactgattatgtctcgctgccaaatctgctggcgggcagagagttagtcaaagagttattgcaggaagagtgtgagccgcaaaaactggctgcggcgctgttaccgctgttggcgaatgggaaaaccagccacgcgatgcacgataccttccgtgaactgcatcagcagatccgctgcaatgccgatgagcaggcggcacaagccgttctggagttagcacaatgatcgaatttgtctatccgcacacgcagctggttgcgggtgtggatgaagtcggacgcgggccgttagttggcgcggtcgtcaccnctgcggtgattctcgacccggcgcgcccgattgccgggctgaatgattccaaaaagctgagcgaaaaacgtcgtctggcgctctgtgaagagatcaaagagaaagcgttgagctggagtctgggccgcgcggaacctcacgaaatcgacgaactgaatattttacatgcgaccatgctggcgatgcagcgagccgtcgctgggctgcatattgcgccggaatatgtgttgattgatggtaaccgctgcccgaaattaccgatgcctgcgatggctgtggtgaaaggcgatagccgcgtaccggaaatcagtgccgcgtctatcctggcgaaagtgacgcgtgacgccgaaatggcggcgctggatattgttttcccgcaatatggttttgcccaacacaaagggtatccaaccgcttttcatctggaaaaactggctgaacacggcgcgaccgaacaccatcggcgcagctttgggcctgtcaaacgcgcactgggacttgcgtcctgattcttgtgtcgagattaagtaaaccggaatctgaagatgtctgaaccacgtttcgtacacctgcgggtgcacagcgactactcgatgatcgatggcctggccaaaaccgcaccgctggtaaaaaaggcggcggcgttgggtatgccagcactggcgatcaccgatttcaccaacctttgcggtctggtgaagttctacggagcgggacatggcgcagggattaagcctatcgtcggggcagattttaacgtccagtgcgacctgctgggtgatgagttaacccacctgacggtactggcggcgaacaataccggctatcagaatctgacgttgctgatctcaaaagcgtatcagcgcgggtacggtgccgccgggccgatcatcgatcgcgactggcttatcgaattaaacgaagggttgatccttctttccggcgggcgcatgggcgacgtcggacgcagtcttttgcgtggtaacagcgcgctggtagatgagtgtgtcgcgttttatgaagaacacttcccggatcgctattttctcgagctgatccgcaccggcaggccggatgaagaaagctatctgcacgcggcggtggaactggcggaagcgcgcggtttgcccgtcgtggcgactaacgatgtgcgctttatcgacagcagcgactttgacgcacacgaaatccgcgtcgcgatccacgacggctttaccctcgacgatcctaaacgcccgcgtaactattcgccgcagcaatatatgcgtagcgaagaggagatgtgcgagctgtttgccgacatcccagaagcccttgccaacaccgttgagatcgccaaacgctgtaacgtaactgtgcgtcttggtgaatacttcctgccgcagttcccgaccgggaacatgagcaccgaagattatctggtcaagcgtgcaaaagagggcctggaagagcgtctggcctttttattccctgatgaggaagaacgtgttaagcgccgcccggaatatgacgaacgtctggagactgaacttcaggttatcaaccagatgggcttcccgggctacttcctcatcgttatggaatttatccagtggtcgaaagataacggcgtaccggtagggccaggccgtggctccggtgcgggttcactggtggcctacgcgctgaaaatcaccgacctcgatccgctggaatttgacctgctgttcgaacgtttccttaacccggaacgtgtctccatgcctgacttcgacgttgacttctgtatggagaaacgcgatcaggttatcgaacacgtagcggacatgtacggtcgtgatgcggtatcgcagattatcaccttcggtacgatggcggcgaaagcggtgatccgcgacgtaggccgcgtgctggggcatccgtacggctttgtcgatcgtatctcgaaactgatcccgcccgatccggggatgacgctggcgaaagcgtttgaagccgagccgcagctgccggaaatctacgaagcggatgaagaagttaaggcgttgatcgacatggcgcgcaaactggaaggggtcacccgtaacgccggtaagcacgccggtggggtggttatcgcgccgaccaaaattaccgattttgcgccgcnttattgcgatgaagagggcaaacatccggtcacccagtttgataaaagcgacgttgaatacgccggactggtgaagttcgacttccttggtttgcgtacgctcaccatcatcaactgggcgctggagatgatcaacaagcggcgggcgaagaatggcgagccgccgctggatatcgccgcgatcccgctggatgacaagaaaagcttcgacatgctgcaacgctcggaaaccacggcggtattccagcttgaatcgcgcggcatgaaggacctgatcaagcgtctgcaacctgactgcttcgaagatatgatcgcactggtggcactgttccgccctggtccgttgcaatcagggatggtggataactttatcgaccgtaaacatggtcgcgaagagatctcctatccggacgtgcagtggcagcatgaaagcctgaaaccggtactggagccaacctacggcattatcctgtatcaggaacaggtcatgcagattgcgcaggtgctttctggttataccctcggtggcgcggatatgctgcgtcgtgcgatgggtaagaaaaagccggaagagatggctaagcaacgttctgtattttctgaaggtgcagaaaagaacggaatcaacgccgaactggcgatgaaaatcttcgacctggtggagaaattcgctggttacggatttaacaaatcgcactctgcggcctatgctttggtgtcatatcaaacattatggttgaaagcgcactatccggcagagtttatggcggcggnaatgaccgccgatatggacaacaccgagaaggtggtgggcctggtggatgagtgctggcggatggggctgaaaatcctgccaccagatataaactccggtctttaccatttccacgtcaacgacgacggcgaaatcgtgtatggtattggcgcgatcaaaggggtaggtgaaggtccgattgaggcgatcatcgaagcccgtaataaaggcggctacttccgcgaactgtttgatctctgcgcccgaaccgacaccaaaaagttgaaccgtcgcgtgctggaaaaactgatcatgtccggggcgtttgaccgtcttgggccacatcgcgcggcgctgatgaactcgctgggcgatgcgttaaaagcggcagatcaacacgcgaaagcggaagctatcggtcaggccgatatgttcggcgtgctggccgaagagccggaacaaattgaacaatcctatgccagctgccaaccgtggccggagcaggtggtattagatggggaacgtgaaacgttaggcctgtacctgaccggacaccctatcaaccagtatttaaaagagattgagcgttatgtcggaggcgtaaggctgaaagacatgcacccgacagaacgtggtaaagtcatcacggctgcggggctcgttgttgccgcgcgggttatggtcaccaagcgcggcaatcgtatcggtatctgcacgctggatgaccgttccgggcggctggaagtgatgttgtttactgacgccctggataaataccagcatttgctggaaaaagaccgcatacttatcgtcagcggacaggtcagctttgatgacttcagcggtgggcttaaaatgaccgctcgcgaagtgatggatattgacgaagcccgggaaaaatatgctcgcgggcttgctatctcgctgacggacaggcaaattgatgaccagcttttaaaccgactccgtcagtctctggaaccccaccgctctgggacaattccagtacatctctactatcagagggcggatgcacgcgcgcggttgcgttttggcgcgacgtggcgtgtctctccgagcgatcgtttattaaacgatctccgtggcctcattggttcggagcaggtggaactggagtttgactaatacaggaatactatgagtctgaatttccttgattttgaacagccgattgcagagctggaagcgaaaatcgattctctgactgcggttagccgtcaggatgagaaactggatattaacatcgatgaagaagtgcatcgtctgcgtgaaaaaagcgtagaactgacgcgtaaaatcttcgccgatctcggtgcatggcagattgcgcaactggcacgccatccacagcgtccttataccctggattacgttcgcctggcatttgatgaatttgacgaactggctggcgaccgcgcgtatgcagacgataaagctatcgtcggtggtatcgcccgtctcgatggtcgtccggtgatgatcattggtcatcaaaaaggtcgtgaaaccaaagaaaaaattcgccgtaactttggtatgccagcgccagaaggttaccgcaaagcactgcgtctgatgcaaatggctgaacgctttaagatgcctatcatcacctttatcgacaccccgggggcttatccgggcgtgggcgcagaagaacgtggtcagtctgaagccattgcacgcaacctgcgtgaaatgtctcgcctcggcgtaccggtagtttgtacggttatcggtgaaggtggttctggcggtgcgctggcgattggcgtgggcgataaagtgaatatgctgcaatacagcacctattccgttatctcgccggaaggttgtgcgtccattctgtggaagagcgccgacaaagcgccgcnggcggctgaagcgatgggtatcatcgctccgcgtctgaaagagctgaaactgatcgactccatcatcccggaaccgctgggnggcgctcaccgtaacccggaagcgatggcggcatcgttgaaagcgcaactgctggcggatctggccgatctcgacgtgttaagcactgaagatttaaaaaatcgtcgttatcagcgcctgatgagctacggttacgcgtaattcgcaaaagttctgaaaaagggtcacttcggtggcccttttttatcnccacggtttgagcaggctatgattaaggaaggattttccaggaggaacacatgaacatcattgccattatgggaccgcatggcgtcttttataaagatgagcccatcaaagaactggagtcggcgctggtggcgcaaggctttcagattatctggccacaaaacagcgttgatttgctgaaatttatcgaacataaccctcgaatttgcggcgtgatttttgactgggatgaatacagtctcgatttatgtagcgatatcaatcagcttaatgaatatctcccgctttatgccttcatcaacacccactcgacgatggatgtcagcgtgcaggatatgcggatggcgctctgtttttttgaatatgcgctggggcaggcggaagatatcgccattcgtatgcgtcagtacaccgacgaatatcttgataacattaccccaccgttcacgaaagccttgtttacctacgtcaaagagcggaagtacaccttttgtacgccgggtcatatgggcggcaccgcatatcaaaaaagcccggttggctgtctgttttatgactttttcggcgggaatacccttaaggctgatgtctctatttcggtcaccgagcttggttcgttgctcgaccacaccgggccacacctggaagcggaagagtacatcgcgcggactttcggcgcggaacagagttatatcgttaccaacggaacatcgacgtcgaacaaaattgtgggtatgtacgccgcgccatccggcagtacgctgttgattgaccgcaattgtcataaatcgctggcgcatctgttgatgatgaacgatgtagtgccagtctggctgaaaccgacgcgtaatgcgttggggattctgggtgggatcccgcgccgtgaatttactcgcgacagcatcgaagagaaagtcgctgccaccacgcaggcacaatggccggttcatgcggtgattaccaactcaacctatgatggcttgctctacaacaccgactggatcaaacagacgctggatgtcccgtcgatccacttcgattccgcctgggtgccgtacacccattttcatccgatctaccaggggaaaagtggtatgagcggcgagcgtgttgcgggaaaagtgatcttcgaaacgcaatcgacccacaaaatgctggcggcgttatcgcaggcttcgctgatccacattaaaggtgagtatgacgaagaggcgtttaacgaagcctttatgatgcataccaccacctcgcccagttatcccattgttgcttcggttgagacggcagcagcgatgctgcgtggtaatccgggcaaacggctgattaaccgttcagtagaacgagctctgcattttcgcaaagaggtccagcggctgcgggaagagtctgacggttggtttttcgatatctggcaaccgccgcaggtggatgaagccgaatgctggcccgttgcgcctggcgaacaatggcacggctttaacgatgcggatgccgatcatatgttcctcgatccggttaaagtcactattctgacgccggggatggacgagcagggcaatatgagcgaggaggggatcccgnnnncgctggtggcgaagttcctcgatgagcgtgggatcgtggtagagaaaaccggcccatataacctgctgtttctctttagtattggcatcgataaaaccaaagcaatgggattattgcgtgggttgacggaatttaaacgctcttacgatctcaatctgcgaatcaaaaatatgcttccggatctgtacgcagaagatcccgatttctaccgcaatatgcgtattcaggatctggcgcaagggatccataagctgattcgtaaacacgatcttcccggtttgatgttgcgggcattcgatactttgccggagatgatcatgacgccacatcaggcatggcagagacagattaaaggtgaagtagaaaccattgcgctggaacaactggtcggtagagtatcggcaaatatgatcctgccttatccaccgggcgtaccgctgttgatgcctggagaaatgctgaccaaagagagccgcacagtactcgattttctactgatgctttgttccgtagggcaacattaccccggttttgaaacggatattcacggtgcgaaacaggacgaagacggcgtttaccgcgtacgagtcctaaaaatggcgggataacttgccagagcggcttccgggcgagtaacgtgctgttaacaaataaaggagacgttatgctgggtttaaaacaggttcaccatattgcgattattgcgacggattatgcggtgagcaaagctttctactgcgatattcttggtttcacgctgcaaagcgaagtctatcgcgaagcgcgcgactcgtggaaaggggatttggcgcttaatgggcaatatgtgattgagcttttctcatttccgttcccgccggagcgccccagccgaccggaagcttgcggcctgcgtcatctggcttttagcgttgatgacatcgatgcggcagtggcgcaccttgaaagccataacgtgaagtgtgaagccatccgtgtcgatccatacacgcaaaaacgcttcaccttctttaacgatccggacgggctgccgttggaactgtatgagcagtaaggcttgtcatcgccgcatttgcccggtaacgtgccgggcattgctactgtaaaatcgcaccatcatgacactcacgctcaatagacaacttctcacctcacgccagattctggtggcctttagcggcgggcttgactccaccgttctgctgcatcagttggtgcagtggcggacggaaaatccgggggtcgctctgcgcgctattcatgtgcatcacggtttaagtgccaatgccgatgcctgggttacgcattgcgaaaacgtctgccaacagtggcaggtgccgctggtggtcgaacgcgtacaacttgcgcaagaggggctggggattgaggcccaggcgcggcaggcgcgttatcaggcatttgcccgcaccttgttgcccggtgaagtgctggtcaccgcgcaacatctcgacgatcaatgtgaaacttttctgctggcgctaaaacgcggtagcggccctgccgggctttcggctatggcggaagtttcggagtttgccggaacacggcttatccgcccgttgcttgcccgcacgcggggggaactggcgcagtgggcattggcgcatggtttacgctggattgaagacgaaagtaatcaggacgactcatacgatcgtaactttctgcgcctgcgcgtagtgccgttattgcagcagcgttggccgcattttgccgaaacaacggcccgcagcgccgcactttgtgctgaacaagagagcctgctggatgaactgctggcagatgatttagcacactgtcaatcgccgcaggggacgctgcagattgtgccaatgctggcgatgagtgatgctcgccnnnnnncgattatccgccgctggctggcagggcagaatgcaccgatgccttcccgcgacgcgttggtgaggatctggcaggaagtggcgctggcgcgggaagatgcctccccctgtttacgtttgggcgcgtttgaaatccgacgctatcagtcgcaactgtggtggattaaatccgtcaccgggcaaagcgaaaacattgtgccgtggcagacgtggcttcaaccgctggaattaccggcggggctgggaagtgtacagcttaatgcgggaggcgatattcgccctccgcgtgcagacgaagcggtcagcgtgcgtttcaaagcgccaggattgctgcatattgtcgggcgtaacggcggacgtaagctaaagaaaatctggcaagagctgggcgtgccgccgtggctacgtgacaccacgccactgctgttttatggcgaaacgctgattgcggcggcaggggtatttgtgacgcaagaaggtgtggctgaaggtgagaatggcataagttttgtctggcagcgaaacgcttagtttagtgaaggccggatatgacgcattaagcgtcgcatccggcgaaagtcaatcaggactcgctcaccaccaccgtaccgatttccgggtggctaaagctggtaattttatccagacgtagctcacgggtttcgccagcggcctcgacgaccagatactccacatttttgcgggagactaaatcgctggctttggcctgcaatttttcgccatctttcagctcaagtgtcagcattaaatgatgctggcaggcgagctcaagattatcgtaatcatcacaattgattggttgatacgtatcattcattgacataatcgctcaccagtaagtttgccgcagcgtatgctgctttttccctgacagcctcagaaagggcgtcgtcggcagccatttcattcagcactttcaaaacgcagcccagcgcgtccggaacgtatcctaagtctccgctggcgatttccgcgtaccgcttgcgtattaactcacaatatttttccacatgccctcctgtcagcactctgacttaaccgtggatgcaagtctaagcctacgaagataaactctgtttcgcaaggtgactataccacactcatttctgcaatatcagcgccgcaactgcacgtattccgttacaatggcctcctgattcgaaaggagttttcttatggcgcttaaagcgacaatttataaagcgacggttaatgtggccgatctcgaccgcaaccagtttctcgatgcctctctgacgctggcgcgccacccttcagaaacccaggtgcgtatgatgctgcgcctgctggcgtggctgaaatatgctgatgaacgtctgcaatttacccgtggtttgtgtgccgatgatgagccggaagcgtggctgcgtaacgatcacctgggcattgatttgtggattgagctggggctgccggatgagcgacgaattaagaaagcctgcacccaggccgcagaagtggcgctgtttacctataatagtcgggcggcgcaaatctggtggcagcaaaatcagagcaaatgtgcgcagtttgccaatctttccgtctggtatctggacgacgagcagctggcgaaagtgagcgcctttgccgatcgtaccatgacgctgcaggcaacgattcaggatggcgtgatctggttatcggatgataagaataatctggaagtgaacttaaccgcctggcaacaaccttcatgattgtgatttcccgacatgttgctattcccgatggtgagcttgagatcaccgccattcgtgcgcagggcgcgggcgggcagcatgttaataagacctcaacggccattcatctgcgttttgacattcgggcatccagcctgccagagtattacaaagagcgtctgctcgccgccagccatcatttgatcagcagtgatggcgtaattgtcattaaggcacaggaataccgcagtcaggaactgaaccgcgaagcggcgctggcccggctggtggcagtgattaaagatttaacaacagaacaaaaagcccgacgacccacgcggcccacccgtgcatcgaaagagcgcaggctggcatcgaaagcacaaaaatcaagcgtgaaggcgatgcgcagcggtcgggaataaaaagaaggaatggatggtgaaaaaagcgatagtgacagcgatggctgtaatcagcctctttactctgatgggttgtaataatcgggccgaagtcgatacgctttctccggcgcaggctgccgaattgaaaccgatgccgcaaagttggcncggcgtgctgccgtgtgccgattgcgaaggaatcgaaacctctctgttcctcgaaaaagacggaacatgggtgatgaatgagcgttatctcggtgctcgtgaagaaccttcctccttcgcttcctacggtacatgggcgcgaaccgctgacaagctggtattaaccgacagcaaaggtgaaaagtcatattatcgggcgaaaggcgatgcgctggagatgctcgatcgtgaaggcaatccgattgaatcgcagttcaactatacgctggaaccggcacaatccagtttacccatgacgccgatgaccctgcggggcatgtatttttatatggctgatgcggcgaccttcactgattgcgcgaccggaaaacgtttcatggtagcgaataacgcagagctggagcgtggctacctggctgcgcgcggccacagtgaaaaaccggtgttactgtcagtagaaggtcactttacgcttgaggctaatccggataccggtgcgccaaccaaagtattagcacccgatacggcagggaaattttacccaaaccaggattgcagtagtttggggcagtaacccgtcttgagacagaaacaaacgcaaaacaggccagaaggatatatttcaacattttgaatttgcacgttttttgtaggccggataaggcgtttacgccgcatccggcaatggtgctcaacgcctgatgcgacgctggcgcgtcttatcatgcctacaacccccctcataccttaaggcggataaggcatttactttatcaccgggtcaaaccaacaaagcgacccgccttgatataaatccctggcttcaggtgcccaacatactgtaactgcgtttctggcttaaacgcagagacatcaccaatacgcatatgcatcagatcggcagggctaatccagcccgattgcgccagcgtaagcggatgcccggctttggcaaatgcatcagtgacaaattccgaacaaaaccacgactttttgtctccttcgaccacactgcttaactgcgctttcgccaggccgctgacgcactgttggcgaaaatcctcggagaacggattcagtgagcacatctggcgagtcaccataaagggaataaattcgacaatgccgcgatagttataaccgctatctttgattttattggcgaacgcggtgatttctgtggcttgttgcggggtaagatccgggactcgtaagacgaaaagtttatcactatgcttcatcgcttttttaagggaaacaatctggacgccagcgcctgtcgcttctgcaacgttattttcacccagatagattgcaacgtgactcacagaggaagtgctgaaaacgcggatcccaaatgaggttacccccaggcttgaggagaacagcaaatcgccgggtttgagatcaggtaccgttatttcttttattgattgttcggtgaaagagctttgatgctggaatttgacagcccatgttttcgcctcggcatctactgctgtggctgatgagtctggctggctgatatcaacggtacaggccgaaagtaaaagaaagcaggggagaagcaggcggcagtacgcctttggtttatccattttatacaatccatgtaaaaaagggccctgaaattcaggaccctttctggcatcagcctttaatttgtttcaccagatattcgacgatgtcaccagtcttaattaactgtttctcgccgttgcgacgatatttatattcgatatcgtcgttgtcgaggttacggtcgcccagcacaatagtgtgcggaataccgatcagttccatatcggcaaacatcacgcccggacgttcttttcggtcatccagcagcacttcgataccttgtgcacgcagttcgctgtacagtttctcagcaagctcttgtacgcggaaggatttgtgcatgttcatcggcagaattgccacctggaacggcgcgatagcgtcaggccatacgatgccgcgctcgtcgtagttctgctcaatcgccgcagccactacgcgcgttaccccgataccgtagcaacccatagtcaggatttggttacggccatcttcaccctgtacggaggctttcagtgcttcggagtacttggtacccagctggaagatgtgaccaacttcgataccacgtttgatcagcagcgtaccctggccatccgggcttggatcgccagccaccacgttacggatatccgcaacttccggggtagcgacatcgcgatcccagttgatgccgaagtagtgtttaccatcgatgttagcaccagcagtgaaatcactcatcgccgcaacggtacggtcaatcaccaccggaatcggcatgtttaccggacccagtgaacccggaccggctttaaccacggcacgaatttcttcttcggtcgcgaaagtcagcgggctggcaacctgcggcagtttttctgctttaacttcgttcagctcgtgatcaccgcgcaccagcagcgcaaccagcgggaagctactgccttcaaccgctttaaccagcagagtcttaaccgttttcttaatcggcagattgaactgttcaaccagttccgcgatggttttcgcgttcggcgtatcaaccagcgtcatttcctgggtagcagcagcgcgcggttctttcggcgcgatagcttctgccagctcaatgttcgctgcatagtcagaggtgtcggagaagaccacatcgtcttcaccgctctgcgccagcacctggaattcgtgagaggcgctgccgccgatagaaccggtgtcggcctgtacggcgcggaaatccagccccatgcggctgaagattttgctgtaggccgcatacattgcatcgtaggtttcctgcagggattcctgagaagtatggaaagagtaagcatctttcatcaggaattcgcgggaacgcatgacgccgaaacgcggacgcacttcgtcgcggaacttggtctggatctgatagaagttcagcggcagctgtttgtaagagctaagctcgttacgaatcaggtcagtgataacttcttcatgagttgggccgagtacgaacggacgctcgccacggtcaacaaaacgcagcagttccggaccgtactgttcccaacgaccactctcttgccacaaatcggctggctgaaccaccggcatcgacacctcgattgcaccggcgttgttcatctcttcacgcacgatgttttcgacttttttcagaacgcgcacgccggtcggcagccaggtatataacccggaggccagcttgcggatcatcccggcgcgcagcatcagctgatggctgatcacctcggcgtcggcaggtgtctccttgagagtggagagcaggtattggctagtacgcatgttgttacggttccagttggaaggtagaacaggctcaaggcgagcctgggacaaaaaaagtgatttagtttaccagtgcaaaagaaatgtcaaaagagaagggcgtgaatttaacgcggttccagcgcaaagacttcaaaacctgcgtcggtgacgcgccagcgaacgttaaaatcatgtagccagacggcataggttttgcccgtttcctcacctttacgataggccgggcgcgggtcttgcgccagtacttcgcggataaacagcgttaactgcggataacgcttctccagcgtcaaaagctgcttttcgacctctgcggtaaaactcaccgccatctctgcagctggcgcactttgcgcatagctggcactggcatcgggaagcgattcggcaaaggggagatacggtttgatatccactaccggcgtaccatcgaccagatccaggctgccgagcttcagaatcacgcagtctttatggcaaacaacctctttcagctctaccagcgacataccaatcgggttggggcggaaagtggagcgcgtagcgaaaacacccattctggcattaccgccaagacgaggcggacgcacagtcggacgccagccgccttccatcgtttgatgaaagacgaaaaggatccataaatggctgaatgcttccaggccgcgaacggcgtcagcctggttgtagggagcaatgagatgtagttcgccgttggcgctttttaccagacctggctggcgcggaacggcgaatttttctttatagggcgagcgaataacacctatttgctcgaactggaaactgctcatttcgccgtaatgttaagcgcagaaccgatacataaagcctgacgatagcagcctggcgtaccgctggtaacttcgcagctatgcagtaataccgcattggctttcattttcgaggcgttgatttgcatccgcttacgcgcggttggaatgctcggcggagagtcctgattagaggcctggcaagagtcgccactgacttcaccgagatcgcggaacggtttgccgactaattcttctgcattggtataaattcggaccggcgtggcgcgcggcgctttcggttttgcaggctccgctttcggctggggtgcagtgctttgaacgggttcgacaggggatctgcttaacatggaacagccgcttagcatgagtgctactaaacagatcggtaaagcacgcatagtatttcctcaatgtatgatcaaaacgtcaatattgaatcaggagcttgtaaaaatgacaagacgggcaagcgcccgtcctgaatgatattacaaattgtggaaacagcctaaaaattaccagcctttaacagcgccgccgttaaacactttgtttgctgcttcgtaaacttcgtcagactgataagcctggacgaatttcttcacgttctcggcgtctttgttatcttcacgcgttacgatcaggtttacgtacggggagtctttatcttcgacaaagataccgtttttcgctggagtcaggccaatctggctggcataggtggtgttaataactgccagagcgatttgcgcgtcgtccagagaacgcggcagttgcggtgcttccagttcaacaattttcagattttttgggttctcaacaacatcaagaacggtcggcagcaggccaacgccatctttcagtttgatcaagcccactttttgcagcagcagcagtgaacgaccaaggttagttggatcgtttggcacggcaacctgcgaaccatcctgcagttcatccagtgatttgattttcttggagtaaccagcaatcggataaacaaaagtgttgcctactgcgaccagtttgtagccacgatctttcagttgctgatcaaggtacggtttatgctggaaggcgttggcgtcgatatcgcctttgctcaatgcttcgtttggcagaacatagtcgttgaaggttaccagctcaacgtccaggccatatttgtctttcgcaactttctgcgcgacttctgcaacctgctgttcggcaccaacaatcacgccgactttaatgtggtttggatctttttcatcctgaccgcagcctaccagtgccagtgatccaatcagggctcccactgccgcaaaggttttgaatttgaacgccataccttattccttcttcaattatttatgttgtgttgaacgttacttgcgagtgacagcccggacgatgcggtcgcctgcgaactgaattaaataaaccagaatgaccagcaataccagtaccgtattcatcaccgtcgcgttatagccgatgtagccatactgatagccaatctgacctaaaccaccggcaccgactgcaccacccatcgcggaataaccgaccagggtaatcagggtgatagttgccgcattcaccagacccggcaacgcttccggtaacagcactttacggacgatctgcattggcgtggcacccattgcgcgggaagcttcaattaacccggttgggatctccagcagagcgttctcgaccatacgggcaataaacggtgctgcaccaacggttaacggaacaattgctgcctgcaaaccaatcgatgtaccgacaataacgcgggtaaacggaatcatccataccagcaagataatgaacgggatggaacggaaaatgttcacaatcgcagaaacggtacgatacagcttcgcgttagcaataatttgccccggacgcgtgacataaagcaggacgccaaccggcagaccaaccacaaacccaaaaaatccggatacgaaggtcattgccagcgtttcccatacgccacgaaccagcagccacatcatcggctcagacataacccagtacctctacttttacatggtgttcctgcagccaggcaatggcggcttgcgtatcttgttgtgtgccgtgcatttcagtcagcatgatgccgaacttaacgccaccggcgtaatccatctgcgcgctaataatgttgttgttgacgttgaaacgacgcgcggtttcagaaagcagtggggcatcgaccgattgaccggtaaactccagacgcagcatcggcacgcagtcagtaaatggctccgcttgcagacgttcctggtaatcttccgggatatccagatgcagggttgactgaataaacttctgcgccagcggcgttttcggatgtgagaacacttcacttaccgtgtcctgctcgatcagttcgccattgctgatgaccgcaacgcaatcacaaatacgcttcacaacgtccatttcgtgggtgatcaacagaatcgtcaaacccagacggcggttaatgtctttcagcagttcgagaatagaacgtgtcgttgccgggtctagcgcgctggtggcttcatcacacagcaatactttgggattgctggctaatgcacgggcaatcgccacacgttgtttctgcccaccggaaagattcgacgggtagctatcatgcttatctccaagaccaaccaatgacagcaattccgtcacgcgacgtttgatctcgtctttcggtgtattgtccagctccagcggcagagccacgttgccaaaaacagtacgcgaagagagcaggttaaaatgctggaaaatcataccaatctggcggcgagctttggtcaactcggattctgacagcgtggtcagttcctgtccatcgaccagcacgctaccctcggttgggcgctccagcaggtttacacaacgtataagcgtactcttacccgcgcctgaggcaccgataacgccataaatttgtccagctggcacatgcaggctgacgttgttcaacgcctggatggtgcgggtgccctggtggaacactttggtgatattcgaaagttttatcattgattatttattatcgtcattaagttagtcgtggcatctcgaatgcctgaaacgggcaacgccgtcaatgaaatggatgttaaggcatccagacgtctaaatcaatcaggtttatgcgaagagcactttcttgcaggtcgaaacatgcgatactagcgtcacatgccttattaaggagctataaaaggtggcgaagagcgtacccgcaatttttcttgaccgtgatggcaccattaatgtcgatcacggctatgtccatgagatcgacaactttgaatttatcgacggtgttattgacgccatgcgcgagctaaaaaaaatgggctttgcgctggtggtagtcaccaaccagtctggcattgctcgcggtaaatttaccgaagcacagtttgaaacgctgaccgagtggatggactggtcgctggcggaccgagatgtcgatctggatggtatctattattgcccgcatcatccgcagggtagtgttgaagagtttcgccaggtctgcgattgccgcaaaccacatccggggatgcttttgtcagcacgcgattatttgcatattgatatggccgcttcttatatggtgggcgataaattagaagatatgcaggcagcggttgcggcgaacgtgggaacaaaagtgctggtgcgtacgggtaaacctattacacctgaagcagaaaacgcggcagattgggtgttaaatagcctggcagacctgccgcaagcgataaaaaagcagcaaaaaccggcgcaatgattaaaagatgagcggttgaaataaaaatgcatttttccgcttgtcttcctgagccgactccctataatgcgcctccatcgacacggcggatgtgaatcacttcacacaaacagccggttcggttgaagagaaaaattctgaaattcagggttgactctgaaagaggaaagcgtaatatacgccacctcgcgacagtgagctgaaagccgcgtcgcaactgctctttaacaatttatcagacaatctgtgtgggcactcgaagatacggattcttaacgtcgcaagacgaaaaatgaataccaagtctcaagagtgaacacgtaattcattacgaagtttaattctttgagcatcaaacttttaaattgaagagtttgatcatggctcagattgaacgctggcggcaggcctaacacatgcaagtcgaacggtaacaggaagaagcttgcttctttgctgacgagtggcggacgggtgagtaatgtctgggaaactgcctgatggagggggataactactggaaacggtagctaataccgcataacgtcgcaagaccaaagagggggaccttcgggcctcttgccatcggatgtgcccagatgggattagctagtaggtggggtaacggctcacctaggcgacgatccctagctggtctgagaggatgaccagccacactggaactgagacacggtccagactcctacgggaggcagcagtggggaatattgcacaatgggcgcaagcctgatgcagccatgccgcgtgtatgaagaaggccttcgggttgtaaagtactttcagcggggaggaagggagtaaagttaatacctttgctcattgacgttacccgcagaagaagcaccggctaactccgtgccagcagccgcggtaatacggagggtgcaagcgttaatcggaattactgggcgtaaagcgcacgcaggcggtttgttaagtcagatgtgaaatccccgggctcaacctgggaactgcatctgatactggcaagcttgagtctcgtagaggggggtagaattccaggtgtagcggtgaaatgcgtagagatctggaggaataccggtggcgaaggcggccccctggacgaagactgacgctcaggtgcgaaagcgtggggagcaaacaggattagataccctggtagtccacgccgtaaacgatgtcgacttggaggttgtgcccttgaggcgtggcttccggagctaacgcgttaagtcgaccgcctggggagtacggccgcaaggttaaaactcaaatgaattgacgggggcccgcacaagcggtggagcatgtggtttaattcgatgcaacgcgaagaaccttacctggtcttgacatccacagaactttccagagatggattggtgccttcgggaactgtgagacaggtgctgcatggctgtcgtcagctcgtgttgtgaaatgttgggttaagtcccgcaacgagcgcaacccttatcctttgttgccagcggtccggccgggaactcaaaggagactgccagtgataaactggaggaaggtggggatgacgtcaagtcatcatggcccttacgaccagggctacacacgtgctacaatggcgcatacaaagagaagcgacctcgcgagagcaagcggacctcataaagtgcgtcgtagtccggattggagtctgcaactcgactccatgaagtcggaatcgctagtaatcgtggatcagaatgccacggtgaatacgttcccgggccttgtacacaccgcccgtcacaccatgggagtgggttgcaaaagaagtaggtagcttaaccttcgggagggcgcttaccactttgtgattcatgactggggtgaagtcgtaacaaggtaaccgtaggggaacctgcggttggatcacctccttaccttaaagaagcgtactttgcagtgctcacacagattgtctgatgaaaatgagcagtaaaacctctacaggcttgtagctcaggtggttagagcgcacccctgataagggtgaggtcggtggttcaagtccactcaggcctaccaaatttnnanngcaaatttgaagaggttttaactacatgttatggggctatagctcagctgggagagcgcctgctttgcacgcaggaggtctgcggttcgatcccgcatagctccaccatctctgtagtgattaaataaaaaatacttcagagtgtacctgcaaaggttcactgcgaagttttgctctttaaaaatctggatcaagctgaaaattgaaacactgaacaacgaaagttgttcgtgagtctctcaaannttnnnnnnnnnnnnnnnnnnnnnnnnnnnnnncttcgggttgtgaggttaagcgactaagcgtacacggtggatgccctggcagtcagaggcgatgaaggacgtgctaatctgcgannnnnnnnnnnnnnntgatatgaaccgttataaccggcgatttccgaatgggganacccagnnnnnnnnnnnncactatcattaactgaatccataggttaatgaggcgaaccgggggaactgaaacatctaagtaccccgaggaaaagaaatcaaccgagattcccccagtagcggcgagcgaacggggaggagcccagagcctgaatcagtgtgtgtgttagtggaagcgtctggaaaggcgcgcgatacagggtgncagccccgtacacaaaaatgcacatactgtgagctcgatgagtagggcgggacacgtggtatcctgtctgaatatggggggaccatcctccaaggctaaatactcctgactgaccgatagtgaaccagtaccgtgagggaaaggcgaaaagaaccccggcgaggggagtgaaaaagaacctgaaaccgtgtacgtacaagcagtgggagcctcttttatggggtgactgcgtaccttttgtataatgggtcagcgacttatattctgtagcaaggttaaccgaataggggagccgaagggaaaccgagtcttaacnnnnnnnnnagnnnnagggtatagacccgaaacccggtgatctagccatgggcaggttgaaggttgggtaacactaactggaggaccgaaccgactaatgnnnnaaaattagcggatgacttgtggctgggggtgaaaggccaatcaaaccgggagatagctggttctccccgaaagctatttaggtagcgcctcgtgaattcatctccgggggtagagcactgtttcggcaagggggtcatcccgacttaccaacccgatgcaaactgcgaataccggagaatgttatcacgggagacacacggcgggtgctaacgtccgtcgtgaagagggaaacaacccnnnnnnnnngctaaggtcccaaagtcatggttaagtgggaaacgatgtgggaaggcccagacagccaggatgttggcttagaagcagccatcatttaaagaaagcgtaatagctcactggtcgagtcggcctgcgcggaagatgtaacggggctaaaccatgcaccgaagctgcggcagcgacactgtgtgttgttgggtaggggagcgttctgtaagcctgtgaaggtgtgctgtgaggcntgctggaggtatcagaagtgcgaatgctgacataagtaacgataaagcgggtgaaaagcccgctcgccggaagaccaagggttcctgtccaacgttaatcggggcagggtgagtcgacccctaaggcgaggccgaaaggcgtagtcgatgggaaacaggttaatattcctgtacttggtgttactgcgaaggggggacggagaaggctatgttggccgggcgacggttgtcccggtttaagcgtgtaggctggttttccaggcaaatccggaaaatcaaggctgaggcgtgatgacgaggcactacggtgctgaagcaacaaatgccctgcttccaggaaaagcctctaagcatcaggtaacatcaaatcgtaccccaaaccgacacaggtggtcaggtagagaataccaaggcgcttgagagaactcgggtgaaggaactaggcaaaatggtgccgtaacttcgggagaaggcacgctgatatgtaggtgaagtccctcgcggatggagctgaaatcagtcgaagataccagctggctgcaactgtttattaaaaacacagcactgtgcaaacacgaaagtggacgtatacggtgtgacgcctgcccggtgccggaaggttaattgatggggtcagcgcaagcgaagctcttgatcgaagccccggtaaacggcggccgtaactataacggtcctaaggtagcgaaattccttgtcgggtaagttccgacctgcacgaatggcgtaatgatggccaggctgtctccacccgagactcagtgaaattgaactcgctgtgaagatgcagtgtacccgcggcaagacggaaagaccccgtgaacctttactatagcttgacactgaacattgagccttgatgtgtangataggtgggaggctttgaagtgtggacgccagtctgcatggagccgaccttgaaataccaccctttaatgtttgatgttctaacgtggacccgtgatccgggttgcggacagtgtctggtgggtagtttgactggggcggtctcctcctaaagagtaacggaggagcacgaaggttggctaatcctggtcggacatcaggaggttagtgcaatggcataagccagcttgactgcgagcgtgacggcgcgagcaggtgcgaaagcaggtcatagtgatccggtggttctgaatggaagggccatcgctcaacggataaaaggtactccggggataacaggctgataccgcccaagagttcatatcgacggcggtgtttggcacctcgatgtcggctcatcacatcctggggctgaagtaggtcccaagggtatggctgttcgccatttaaagtggtacgcgagctgggtttagaacgtcgtgagacagttcggtccctatctgccgtgggcgctggagaactgaggggggctgctcctagtacgagaggaccggagtggacgcatcactggtgttcgggttgtcatgccaatggcactgcccggtagctaaatgcggaagagataagtgctgaaagcatctaagcacgaaacttgccccgagatgagttctccctgaccctttaagggtcctgaaggaacgttgaagacgacgacgttgataggccgggtgtgtaagcgcagcgatgcgttgagctaaccggtactaatgaaccgtgaggcttaaccttacaacgccgaaggtgttttggcggatgagagaagattttcggcctgatacagattaaatcagaacgcagaagcggtctgataaaacagaatttgcctggcggccgtagcgcggtggtcccacctgaccccatgccgaactcagaagtgaaacgccgtagcgccgatggtagtgtggggtctccccatgcgagagtagggaactgccaggcatcaaattaagcagtaagccggtcataaaaccggtggttgtaaaagaattcggtggagcggtagttcagtcggttagaatacctgcctgtcacgcagggggtcgcgggttcgagtcccgtccgttccgccacttattaagaagcctcgagttatcgctcgaggttttttttcgtctacatttctattattgctaaaatcgcaaaaatcctctgcgttttacgccctttttccgcaacattctaaagcccataatcacctcagttaacgaaaatagcattaaaagaggcatattatggctatccctgcatttggtttaggtactttccgtctgaaagacgacgttgttatttcatctgtgaaaacggcgcttgaacttggttatcgcgcaattgatactgcacaaatctatgataacgaagccgcagtaggtctggcgattgcagaaagtggcgtgccacgtcatgaactctacatcaccactaaaatctggattgaaaatctcagcaaagacaaattgatcccgagtctaaaagagagcctgcaaaaattgcgtaccgattatgttgatctgacgctaatccactggccgtcaccaaacgatgaagtctctgttgaagagtttatgcaggcgctgctggaagccaaaaaagaagggttgacgcgtgagatcggtatttccaacttcacgatcccattgatggaaaaggcgattgctgctgttggcgctgaaaacatcgctactaaccagattgaactctctccttatctgcaaaaccgtaaagtggttgcctgggctaaacagcacggcatccatattacttcctatatgacgctggcgtatggtaaggccctgaaagatgaggttattgctcgtatcgcagctaaacacaatgcgactccggcacaagtgattctggcgtgggctatgggggaaggttactcagtaattccttcttctactaaacgtgaaaacctggagagtaatcttaaggcacaaaatttacagcttgatgccgaagataaaaaagcgatcgccgcactggattgcaacgaccgcctggttagcccggaaggtctggctcctgaatgggattaagcctctctgacagctcctccgggagctgtttttacatgctcgctaaggaaatcgataaaagcccggatgcgcgtacttaccgcacggtcgctgtaatagacggcactgaatggcatttccactggcaacactttatctgccattaactccaccaattctccgcgagcgatttctctgtcgatcatatagtcggacaaacacgcaatcccgttgccactcaggcaaagctgtttcagtgtttccccactattggatgacaaaccgtacttcacctcatgtaattgtccatcgctacaggctaccggccaggtattgagggaagcgggttcagtgaatcccaggcaaacatgttgctttaaatcgtcgatcgtttctggcttcccgtagcgggaaatataatcgggggaggcgataatttttcgataactgttaaataacggcctggcacgtaagctggaatccgttaacgtaccggcgcgtatcgcgacatccacttttctttcgatcaaattaataatcgtttcggaggagactagcgataaagtgacttccggatagcgttcacgaaaaggcttaatcaacggcatcagaaagtgcagcaccactggagttgcggcatcgatgcgcaacagtccacgcggtgtattacgcgtctccataatttctgattctgccgctgccatctcctgcaaaattgactgtacgcgacgaaaataacgctcgccttcttccgtcaggctaagttgccgcgtggtccgattaagcaggctaacgccaagtttcatctccagctttttcaccgcccggcttaccgctgagtttgcttgccctaattgttccgctgcccggctaaagctgccgctttcgacgaccgaaacaaaaatggcgagttcttccgacgtggctttcatttttgctcctgttgcaaaatagatgagatattttgaatttatttgtcattaaaccatcaggatgcgtgatatgtcatccgatttaatgttctcaataatgagcaaaattctgaccggtgtaagcacttgcttacataacaatatacaattgctcgttgaaagagtgagctaaaatccctataacagtagaaccctcccgagtgcggaagggttgacgtaatagaggtttcaaagtcaaaagtgcgaaaaaacacctatgccatgcgctatgttgccggacaacctgcggagaggatcttaccgccggggtcttttgcgagcatcggccaggcattaccacccggagaaccgttaagtaccgaagagcgtattcggatcctggtgtggaacatatacaaacagcaacgcgctgaatggttgtcggtattaaagaattacggcaaagacgcacatctggtgttattgcaggaagcgcaaacaacgccagagttggtacagtttgcgactgctaactatcttgccgccgatcaggtacccgctttcgtgctgccacaacatccttctggcgtaatgaccctttcggcggcacatccagtgtattgctgcccgttacgtgaacgagaacccattttgcgtctggcgaagtcggcactggtgacggtctatccattacctgacacccgcctgttaatggtggttaatatacacgccgtcaacttcagtctgggcgtggatgtttatagtaagcagttacttcctattggtgatcagatagctcaccacagcggcccggtcattatggcgggagatttcaatgcctggagccgtagaaggatgaacgcgttatatcgttttgcgcgggaaatgtcgctgcgtcaggtgcgttttaccgatgatcagcgccgtcgggcgtttggtcgcccgctcgattttgttttctaccgtggtctgaacgtcagcgaagcttctgtactggttacgcgcgcgtccgatcacaatccgctactcgttgaattcagtcccggcaagcctgataaataaggtatgtcaggtctgccacagggcagaccaacgtttggagctgcccttttatactcaaacaacaaaaggacagtgcaatgacaacacaatcccaccatgaccacgtagaaaagcagtttagctctcaagccagcgaatatctgaccagtaccgtacatgcatccggacgagatttacagcgcctggcggtgtgtctggctgattatcctgatgcaagtgtacttgatatgggctgcggagcagggcatgccagctttgtcgctgcgcaaaatgtgagcacggtggtggcgtatgacttatctgcccaaatgctggatgtcgtggcacaagctgccgaagtccggcaactgaaaaatatcaccacccgccaggggtatgccgaaagtctgccatttgccgataacgcatttgatattgttatcagccgttattctgcccatcactggcatgatgttggtgcagcactgcgtgaagtgaaccggatattgaaacctggcggtaggctgattgtgatggacgtaatgtctccgggccacccagtgcgcgacatctggttacagacggtagaagcattatgcgatacctctcacgtacgaaactacgccagcggtgagtggttgaggttaatcaatgaagccaatctgatagttgataatttaattacagataagttaccgctggaattttcttcatgggtcgcgagaatgcgtacgccagaagcgttagtagacgctattcgcatttaccaacagagcgcatcgacagaggtgagaacgtattttgccttgcagaatgatggctctttcaccagtgatatcatcatggtagatgcacataaagcggcataaataaaaaaggcaccgggggaatcggtgcctttctattatctggtttgtcaggagtctggcatgctgttgtttttcacaaacaacgtcagcttatcgcctggttgcagattcgcagtatcgctgttccagcgcatcacatctttgatgttcacgccgtggcgtttagcaatgcttgaaagcgaatcgcctttgcgcacacgatacgtaatgctatcgctgttgtttgccaaccgctgtgcgctactacctgcgccaatcgtcagactttggcctggtttcagcttagagccgcgcagtttgttccactgctgcaaatctttggtgcttacgccgagacgtgaagcgatacttgaaagcgtgtcgccagagcgtacggtgtaaacacggctgttaagcggcgtattgtcggcaaccagcgtcgactgtacagcagcaatttcgcctgaagccagagattcacgcagttgatctgcatgcttctttggcaccatcacgtactgcggaccacttgcgcccagcgtggagcctttcacgccagcgttgaatgtcttcagcttgctgacggaaatccccgccatatctgcaaccttcgccatttcaaccgggctactcaggtgcacacgcgccagagcacggctttcatcggtcgttggcagacgtacgccataacgcttgctgtttttgagaatatcactcaatgccagcattttaggcacgtactgcttcgtttcctgcggcaacggtaacgaccagaagtccgtggatttcccacgcgctttgttcgttttaattgccttcatgacccgaccttcgccgctgttataagccgctacggtcagaagccagtcgccatcaaacattttgttcagacgctgcatcatattcagcgcggcagttgttgaagcaacaacatcgcgnnnngcgtcataattgcgggtctgtttcaaaccataattgcgccccgtgctcggaatgatctgccagatgcctgcggcattggcgccagacgttgcgtgaggatcaaaagcgctctccactatgggtagtagtaccagttccataggcatgttacgttttttaacttgcccggctatccagtacatatacggctctgcccgtaaagttacatcgtggagatagctcttattgcgtaaatatttctgtttctgttcgcgaatccggtcattttccggaattcccatctttagctcgtcgccaatgaaagcccacaagtcaccatctggcgcgatagacgtcccatcgtccatccatcgtgcctgacttgtaaactttgctgcttccccttgaccagctgcagaaaggctctgtgcgtgctgttgaacgttgccggtactctggcaacccacgagcaggacagaggcgagtaatatcgcttttgccttcatgtgtgcgtcaatagttgcttaaaagacgaccgatcataacggcgaacggagccgatgacaagaaagttttatcagaacctatctttctttgaccttaaccatgcaaaacgctcttcaggttgttgcaataatgtttcttcattaattacattaattaaatcaatatcttccgttcttaaaaaaacattaatttgccgctcatttttcagaattacgggtagtgttatttgattttttgcccgtaactccttaactttacgataataatcatttatggacaaatcgtgcggaagaatactcaaagcaaacttcatatttgataacgtatattcatgagcacaacataccaatgtatcgtcaggtaacgcacttaactttttaagtgattgatacatttgtgatgctgtcccttcaaacaaccgaccacacccaccagaaaacagcgtgtcgccgcaaaatagataaggtttactgaagtaacagatatgtcctaaagtgtgacccggcgtggcaattacactaaattcatgccccaaaacgaaggcagtttcgccatctttgactacctgtgttgttcccttatcttgtgtctcttgtggaccatacaccacaatttgcggaaacttttccaccagttcttttacgccgccaacgtgatcgtgatgatggtgggtgagaaatatggcctccggttgccagttattggcggcaatggcgtttaatactggctctgcgtctccgggatcgacaatcaggcagcgacctgcttcatcattcaaaacccagatgtaattgtcatcaaaggcgggaatactgttaagattcatagattacctctcagtgtgaaacggaaggttgtgatgaaaccggcaagagtccctcaaactgtcgtggctcctgatcgctggggcgatttgccctggggagagctttatcgcaaggcgctggagcgccagctcaacccgtggttcactaaaatgtatggttttcatctgcttaagattggcaatttaagcgcagaaatcaattgcgaagcgtgcgcggtttctcatcaagtgaatgtttctgcgcaaggaatgcctgtccaggtgcaggcggacccacttcatcttccttttgccgataaatccgttgatgtttgtctactggcacatacattgccgtggtgcaccgatccgcatcgtttattgcgtgaagccgatcgggtattgattgatgatggctggctggtcattagtggcttcaatcccattagtttaatgggattacgcaaacttgtgccggtattgcgcaaaacctcgccctataacagccggatgtttactctgatgcggcaactggactggctctctttgttgaattttgaagtgctacacgccagccgtttccacgttctcccgtggaacaaacacggaggaaaacttttgaatgcgcatattcctgcgcttggttgcttacaacttattgttgcccggaaacggactattcctttaacgctaaatccgatgaaacagagtaaaaacaagccacgaattcgccaggcggttggagccacccggcaatgtcgtaaaccacaggcttaaacttcgacttggtagcccgtatcttccagtgtgggattcatcgccgcggcacgagccagttcatcacagcgttcgttttccgggtgtccggcatggcctttaacccattcccatttgatttgatgctgccccaatgcagcatcaagacgttgccagagatcgacattttttactggttttttgtctgcggttttccagccacgttttttccagttatggatccactgggtgataccctggcggacatactggctgtcggtactcaaaatgacttcgcaatgttcttttaacgcctccagcgcgacaatagcggccatcaactccatacggttgttggtggtgcgggtgtagcctgcgctaaaggttttctcgcgtccgcgatagcgtaaaatagcgccgtaacccccaggtccaggattacccagacacgaaccatcggtgaaaatttctacctgtttaagcatctctggtagacttcctgtaattgaatcgaactgtaaaacgacaagtctgacataaatgaccgctatgagcactgcaattacacgccagatcgttctcgataccgaaaccaccggtatgaaccagattggtgcgcactatgaaggccacaagatcattgagattggtgccgttgaagtggtgaaccgtcgcctgacgggcaataacttccatgtttatctcaaacccgatcggctggtggatccggaagcctttggcgtacatggtattgccgatgaatttttgctcgataagcccacgtttgccgaagtagccgatgagttcatggactatatccgcggcgcggagttggtgatccataacgcagcgttcgatatcggctttatggactacgagttctcgttgcttaagcgcgatattccgaagactaataccttctgtaaggtcaccgatagccttgcggtggcgaggaaaatgtttcccggtaaacgcaacagcctcgatgcgttatgtgcccgctacgaaatagataacagtaaacgaacgctgcacggggcattactcgatgcccagatccttgcggaagtttatctggcgatgaccggtggtcaaacgtcgatggcttttgcgatggaaggagagacacaacagcaacaaggtgaagcaacaatccagcgccttgtacgtcaggcaagtaagttacgcgttgtttttgcgacagatgaagagcttgcagcacatgaagcccgtctcgatctggtgcagaaaaagggcggaagctgcctctggcgggnataaatacatgtaaaaggcgctaaaaatagcgacttgggcgatttttgcagcaaatgattcaaaagatgagaaaaaccgttgacgaagggtgaggcaatccgtaatattcgcctcgttcccaacggaacacaacgcggagcggtagttcagtcggttagaatacctgcctgtcacgcagggggtcgcgggttcgagtcccgtccgttccgccaaattcacctcatgaaaatgagttcagagaaccgcaagatttttaattttgcgggtttttttgtatttgaattccaccatttctctgttcaatgattttactctggcgtaagtgcgtgattctcgcttgttgtctcattcattaaaattcaataatgatatcgaaccattcagcttaaatatntttccagagaanaaatttatattgattaaatgaatgtatatttcaaattgattttgtttgttattatttaagtggggtatataattagagtccgttatcaatgctaaatattctaatcattatgacaggcgagggagtgtccaattatgaattcaaaaaagctttgttgcatatgtgtgttattctcgctgcttgcaggatgtgcctctgaatcttctattgatgaaaagaagaaaaaagctcaagtcacacaaagtaatattaataaaaacactccccagcaactgacagacaaagatttattcggtaatgaaaccactctggccgtatccgaagaggatattcaagcagcgcttgatggagatgagttccgcgttccccttaattctcctgtaatacttgttcaatccggcaaccgcgcaccggaaaccattatgcaggaggagatgcgaaaatattatactgtttccacattctctggtatcccggacaggcaaaagcctctgacttgtaacaaaaacaaagataaaaatgagaacgaggatgttgcccgtgctgagaatatgaactggatgcaggcactgcgttttgtggctgcaaaaggacatcagaaagcgattattgtttaccaggatatgttgcagacaggaaaatatgactctgcgctgaaatcaacagtatggtccgactataaaaatgaaaaactcactgacgctatctccctgcgctacctggtacgtttcacgctggtggatgtggcaacaggtgagtgggctacctggtcgccggtgaattatgaatcgagagtaatttttccgccggctggaataacaaaaacgagcaataaagaactatcaaatgaccatgttacggaagcgcaactgtttaatttgaaacaaaaaacatatgtatcgatggtgaaagacttggtgagtcgattccagtaatcgttattgttatgctgccgcctgtagtttagggtggcagcaaacaggagttgagtatttctataatgtaaatatgattgtttttataaagttataatatatattaccagtgtattgcatgtgagttatttttttaattcttcataaattaaaatggtatcatctgcaatggaaagaattgctattatctcttcatttttttatatttttcttttaatgtcttgtttctttcttttaatggagtacattcattaataatatcattcttagctgtcattgagtcagtttcgatatcgaatgctaaatctacaaagcaataatctacgtagaacataaatctacgtatatcttccggtatagcagtggaaaaataacggtattgcgtgtaagtggtttgatcatcgaattcgtctgattgtactgaatatgtaaatgtggccagtataaatagtaatgttaatcttaaatttataataatcatttgctggatatctcatctggattttgaaagtcagaaatgtaagcattgtttagttgcatggctcttattttgtttaactcagtatagcatggatatagccgagagaatgccagtcgccctactctggccccccaggttagagtaaaagagcattgagcaaatctgtaacgtataaattccctattagaagactctagtctttttaaagaaataactgcttcttttcttattgcttcgtcctcatcactattccatttttgaattttctcttttatatttgcttctgcttttttaagtgtaatagtgctcataataaatgagtttttaacacaatcaataaattcaagttcatcaacaccactacattctttagacatggaaatgtcaaatgccagaccttttgtacatgagaatgtcagcagtagaataattgttatttttcgcattctcataatactctgttttttgtgagtaatgtataaacgaactgaagttttattgcatacttgggatcgccaccaccattataattcatcgctacattttttattgtgataggtttccatccagtaattattactttcatggatgctttttgataatataaaatatctcccgggtgtattttatcgagattttttccaggattgtttttcgttaagttaggtatggtcgtttttctctcttttctgatgttgtcagccaaatcgcctttttggacaatggcgctatatagagttgagtcatattgatcgatagttgattcttcctttgtattagaaagtttcatcattaagtaagtaattgctgctttgatattctcttctggagagccagttatttgttcttttgcccagtaatttctttctggatcttttaacccattgaatgctttgtttctccattgtggtggggtaacaagggctgtagatttttctccagagattaaagctggcatcgctttatctttccgaaaacgaccaatttgtaatggataaccattccactgagaagtattttccgcatcgttttcagtccagagcatggcttttattatataccaatccaacggctgaaagtatggagtgctggacaaatgaatgttgatttcattaannnnnnnnnnnnntaataagtcatatttattccattctttatgattgctcacaaatgccaactctcttattttttttcatttaaaaaaatcactttcatcttctgttattcttgatgcgaaatcttgtcttagttgaaatgggaatttttcattaaataacgtactgtcagtgcttgtatttttgctttcactgtctgatgttgaagagtgtaaaatattgttagccattataataatcccatatgttntnnaaanagacgatcttcccataaactgtatgcactagtgccagcggaacaatgctcccatataattgactcataactgaaagaaactgactcttcgggttgaacgctgttatcaacaacaatatgtgatatagagacatgaatgtcgcttatctttgctccagttaatttgattttatagtacagttcattaattccaaatttatttgtacgataaaaggaaaaatcacatgtcaataattcattgtcgcaaattgctttgcctaataagggtgatgctttatctataggtttttttattgtcaaatgatgatggttgacgttttgatctcgatttaatccatgcatgaattcataaatcataatttgatcaatgtgtgctgtttgagctttatttccaatggatggttgtgatgaacaaccacttgaaatgagcccttgattatcaccatttagtgttaaataaattaaattcgccatttaaaactcctttgtattcatgaatgttattgaaattcaatgctttttttatcgtcggtatcgtattattcttcagcagcagccagcggcttaacacgccttcgagtcgctcattaatttgtttttccagcgcatctgtattctgcttctgcgcacgggcatcctggtactgcgtcaacagagactcaacgggtgtttcctgccccagtccccgctccgcctgccagatgacatttttgatataggaaagggttagtccctctttctcgcgctgcatcactagatctgcaaaagcatgtaagtcctggcgggtctgcaaccagccacgcaactgcgggctactctgtgcgcgggttttgagtgcctcattccattgtgtcgaggcctgttgctgttgcaggctttccggccagcgactgtcggcaacacgcatcatctgcatcccggtttccagcggctgtaccggggaggtatcaagaagttgttgcagcctgcgctcatagttttcgagttcaggtgaggccatccacaccgttgctgcgccctgagcggtgtcgttaacctgtaacagttgctgctgcaccggatagacctgccaccaccacaatgctgaggcgacagccactgaacaggcgatccctgcgataaaccctcttaccgtactgccttgctttatcacactggcctgtgggggattctctgtcagactgcgcacttccactttcatctcaggcaggccgggcaggggaggcactaccgcttctggtgtggaagatgcctgtgtttccggggcataaatcagcgttctgaccgtggtctgtgcggcgttctcagtgttactcttcagctggggttcaagccgtttacgcgtgttctgcataaaatagagcagattctccacgcgcggaacgcgcttcagttccacctgctggagcttatcgcagataagctgcaatgcccgctctgtgcggtagatcagtggtaggtcggattccgcaaaggagatttgctgacgcagaatattgccggttcgggagttaaaccagtccagcatttcagtacgcgccgggccgccntgcggccagaacttatcccagtcgtggcttaccattgccgccagcagttccgcaccttcgcagaatcccgccagtccctgtgtccgtgtccgggcaagcgtatagtaggtggcggtgtgtaaatccacaccgttggctttaaaaatcgccagcgccagcgactccaccagtttccagttcagctcaggctgtgacgggtggctggctttgtttatttcctcgcggatggcgctgaattccggcagcccgcgcgggtcactgccggtaacgatagtttgtgtcagtacgttactattcatccctgcctcctcagtacagtgtgtctgacagaccaaactggctgaacaacccaccgctgaacgggttatcttccgtgtcggtatgcacacggtaggtcatcgcgccaccgtccacgctaaagcgcacggtaaagttgccatcctgtactccggtcagttgtccggccccgaacaggcggaactgcgcccacggcccgctgaagctgatactgcgcggcgcgttgccgctggtgccgatgagcgtcagcttactttcgttgccttcgcgcatgttgttaggccagaccagatgggcggtatagttacggccctggctgtaatcgactaactgaccgtcaaggttcagtacactgcggcgtttattgcctgaaagcgataccgtttccacggcaaaggatgttcccagaccgttctgtttgctgaagaagatgtcacggattttctgcgcagtttccagttgcgcaataatatcttcgcgaataatgacgttgttatcgccatcctccagactcaggtcattatcgataaacagcttcaggttctgctggtagaaggtatccagtatgccatccggtttaaagaagcgttcgaaggcatccagtgaggcatcctgtgcagaacgcggattaaacggatagttatttgccagttgctcgttaaacggtttcaccacgctgtcgcgccagtccacttccatataatgtacagcctccaccatcaccacatgccaggcctggtcagtcagtctgccaacccagcggttgagcggagcaggcagcgtttttgccatctggcgggtggcgaatatcggatcgctgctgttctgatcaagccgtaactgcacggctttcagcgccgatttccctggtacaggcgcgttctggattgccagcaggtagcggtgcaactcggtgagttgctgatacacggcctgcatcgtgctttctttgtctttctgtactgccagggtaatgttttccggggcgaactcatgcccgagacgggtgagtaactggtagtccggctctgccagggcctcatcccgttctttggcagagagtttttcagaaaagacgcctggctgtgtgttgtcacgcagcacggtcagcgcccgctgcaaaggctggtcgccgctgataacctgctccagcgccccggtcagttgtccgatggactcaaaattgcggatattcagattgtccatcccggcccgccaggtggcggtgtagtcgctgatatactgctcggtgagctggcgctggatttccgcgcggtcggcgtcactgtatttcacgctgcgggtaaggttaagtacccaggaatccatcgccgtcagttcaaccagttcatcgcgctgttttacaaaatagctttgcaggccgtaacgggtaagaaactgtggaacaaccagtttgttgtcatcggcagatgtaaacacctggtcaaaggttggccctacctggtcacgcagattgaggtcggcaggaagaacgcccagcgcccgcgttttcaggctctggtaaacccgctggtagacaggcagtttgctcagttctttctgtgctgataccacgggcttgtcatatggcgtccagcggctgatggcgtcaccgtcgcccgcctgacgctctgcgtgccagtcagtatgagccagcgcgtagtcaagatgggacatcagttgtgcctggatatcgcgctggccgtggaacttttcgctccagcgttttgccatatactgcttcaccacctcattgttacgtccgcttttgtcctccagcattcgcatcacgcgcagcaccgcgagtttttcttcactctccggcggcgcggcattcatcgctttaaccagcccgttaaacagcgagggcaggtaacgttgctccagcagttgcagataggtctgttccacataaggtccgatacgtcgtccctggtacagtcccatatcggccagacggctgcggtcgccccagtcgccataggccagtgtggcatcgcgtaccgggttcagcagcggcagttgcaggttgccgtagtcatcttccccctgtggaggcggcacatccataaaggctttggcctgcttaagcacggtgatgccggactgatagttaccgttgtaatagtgatgccagccggtgatgagcagcagtgccgccacgccgccggtggnagagaaaaccgtcaggcggcgacgggaacgcatcagccaggcgcggctctccgttgccagattaggctctgcgagtaatgcctgcgggaacaagctgcgggtgaaataaggcgcggtgtccaccagaggccaggacgccagtgggttattgcccagtcggtactggcgggcggcagactgggtgaatatatcatccatctgcccgcgctgaagcgaagaggtgagatagacaccacgcagcatcacgttcatattttcaccgtcaagcagaccctcaagcagtgacaccagcggttcacggcttccctgcatctggcgggaaaaantgaataaagacgcgcgggtgtgagtctgggtgaccatcagatccggcaacgccagattcattcgatccacccatgtctgccagaaagcattcaactctgttcgccagtcatcattttcatgggcacggcgggtgaacgtgacgcccagaatcgcatcgcgatcctgtctgttcagggactggaacagggcggcaaaaccctgtaataaatcaagccgggtcagtaccacgtaaaccggtaactggcagtgaagatgctggcgtatatcctgtaagcggctgcgcagcgtctgtaacagatgctcgcggtggcgtttgtctgcggtcagcagatcgggtaaatcgagtgtcagaataatcccgttcagcggctggcgcgcgcgcttttctttcagccagccgagggcatgttcccacagacggcgatgcaggatatccgcatcagcgggagcgcagagtgtgccgtcgatatcaaagatcaccgcctgtttaccgacatggggcgtaaggtacaggcgttgttctgtgccgcgcgcgccctccggggcataaataatgtctgacggaaacccctcgcgcagcagtgtcgttttgccactgcccgccgggccgatgaccatataccacggtaactgccacaggaaacggcggttgtcgagatggcgttgcaggcgcagcagccagcggtcaaggtaacgctgctgggcgttcagctccacactgagcggatcaatggcctcttcgcgctgctgtttttgctgtttttcaagcagttgcaggcgcttcattacccggacggtaagccacaccagggcaataatcccccacgccgccgttgccagccagcggttcgccagtggtttgagccactgttcttcatacagcgtccacgtcgggcctttccaccagatccataccagcagaaaaatccacgccagtannnnnnnnnnnnaaaatccacgccagtatcagcagccagaaagcggagactttaaaccggggcatcgccggtcgcagggctgatttgagtccgctgagtagtcggggtgttggtaatctgaacacaaaaactcctgttctcttttattgttctgccgtgaatttttgttcaagctgcgtaagtaatgatggctcccagtcagacaccatcatctgactccctatcatcaacaacatccggtactgttgctgcgcaagctgtatcagccccgcctcctccgtcaactgtgcggcaaggtactggcggtgaaactgatcgcggggatcgccttcgggtagcatgtccagatatcgcagcgccgcctccagaccctgcccagcaaaacaggctctggctgcctgcgattcctcaccgatttgcgcaaccggtgcaactttgccgtcgggcgaagcagccagccattgtttcgtctgctcactgagaaacggtgtgcggtcattaaacagcagcccggtaagctggggcagacgctcaaggaagcggatgacctcatcgcggatggtgtctgccacctgtttgtaacccagacgcagtgccgtctgtgcagaaagacagtgaccgtccagccagtaaggagccagcaatacgcttttctcaacctgttgccacagcgccatatccgcgctggcaagccgggactggtaatccgccaccatatcggcagagaccgcagccagtggggtacgtccatcgctttccgcctggggtgtactggtgatggattgccacagggcatggcggcgcaggcgatagccctgcggcgagtccggctggcgttcacataaaatagccgccacttttaacagcgtgtcgcgccaggctttgtcgtcgtgactgtcgatggcgatttggggagccggagcactgggttgcgtcacgccgctttcagacgtgacggtggtttgtggtgaactaccggaggccgccggagtggggaccggagcaggagccgcacgattaaacgtacgctggtacagggcaaaaagatcatcggtagcctgtgccagttccgggacgttatgtgactgccagcactgcgccagtttcgccagctcacccagcagagtatcgcgctgcgttgtggcagcgttttgtgaaaagccttcaataccgtttcaaaacgtttaatgatctggctggcaaagcgttttttatgcgccatattctgcggcgcggccacagtccagtaatgttccacgtatagcgttagcaggtgcagtgccagcagtggatcaccggcatgttgcagggttctgagcaggtgtgccagtagcctgaagtctttgctttcagaagccagaagctgtagccccctgcgttgtagttcgggaatatcaagctgagcgtgggccagagaccccagcttgacgatttcgccgtcgatatactcccagtccgggttgtcatctttcagcgccgatgccagtttttcttccggcaggttttccagcaggtgcgatatccagacattcggatcgcgtaagtccattgccatatttttattctcccgcccagtggcaggcatcgcgcaggggggcaatcgcccttgccagcccgtcaatgttaaaggtcagctttcctgcggcgttatctgcgccggtatccactgtcagcgtttttgcgccgaacagttgcttaatttcatcaatcccggacagcccccggctggactccagcagggtgccgttctcgcgcacaaaccagtggctgcgcaatgcccggctgtcggcattcagagtgacggcgatatcatggacatccagagggtgcatcagcgccacctgcatccgggtgatattgtccacgcaactgaacatcagcaccgggcgcggcggaacatggccgatagccggggtggttatcaccaccgtcgggcgctcccccggcacctgcgtcaccagcagttctgtggtgttgccctcgcggcgtttttcctgctctgtggcgcgggtccaggcctcgcccacaaaaccggctttgaccagcgccccgtcaaaccctgacggggacagcggtgccagcaggtggtcatagcagtcaagccgctccagcgccgcggactcccgccgacaggactgcatggcctgtaacgtggctgtcgcatccggcggggtcgtggtggcgacggcgaccgccacaccggccattgacgatgcttctgcgggcgcggcagtggcgggtaagcccgtcatcaggcccgcgataaaccatcctgtctgccggaaaacgcgcaacctgctcataaaaccgtttcatcctttgtgacggactcgtcgttctgagcatcttccacgtctgccgtaaatgcgccgtccactgccgacaaccgaatccgggcaatcgccgtgttagccgccattttctgcaacagcagcagcgagagcggcggtagcatgtcgccatcgatgacagattccagcatcctcgcgccgttttccgcgcgggtgacgcggctcatgatttcgtccgtcacttccggttcaatgaccacttctgcaccaaagcgactgcgcagcacgttatccagacgggccagtttcccggcgataatggtggcgagcgtctctttcgacagcggcaggtacggcaccacctccattcgcgccagcagggcaggtttaaagaagtccgccagcaccggatagagggcttcctgcatggtttccgggtcatccgcgtgttcgacaatcacctggtaaccgaggttggaggtgaggaagaagacgatgtttttacagtcaatcaggcggccttcgccgtcggccatctcgcccttgtcaaacgcctggtagaacaggttgaggacatccgggtgcgctttttccacttcatcgagcagcaccaccgagtagggtttctggcggatggcttcagtcagcacgccgccttcgccatagccgacatagcccggaggggagccaatcagccgcgaaacggtgtgtttctcctggaactcggacatattgatggtggtcaggtactggcgaccgccgtagagcagctctgccagttgcaggacggtttcggttttacccacgcagctggggccagcgagcaggaacgcaccgagcgggcgtcccggacgacgcaggtcggcgcgtgcggtcagtagatgcttatgcaggctggcaatcgccaggtcctggcctttgatggtgtcgcccagccatttcggcaggtcggtgatgaccgacatttcattctgcgacaggcggttgagcggcacgccggtccattcggcaatcaccgccgcaatctgttttttatcgacgtgcggggagaccagcaaccggtcgttatgcagggcgtccagttcggcagtgagctgggccagccgctgtaccggggaaactgtttcagcggtctcttccggctgttctctgtcggtctcatcagccggtacggcaccggtattatcctgttctgactctgactctgactctggctgcgtatcctccacagtatctgcgtccggcaacggcgccgcatcgtcctctgccacgcccagtaactgctggcgcagcgcgataatctcccggaccagcgtctgctgctggtgccaagccgcttccagttcatccagcgccgtcagcgtttcatcatactgcaccagcacctcggtcatccgtgatgtgtcggtacgcagtccgatgcgaagctcgcgctcaagctggcgaatttccgcctcctgctggtggctcagagtggtcagcgccgagatttgcttcggcggcgacgacaggttgatggccacacgggcgcaggcggtatccagcacatcaatcgctttgtccggtaactgacgcccggagagataacgttcgctcagcgttgctgcggcctgcaaggcatcatcgtcaatcagcacgccgtgagaccgttcatagaccgccgacagaccacgcagaataattgtggcttcggcagcgttgggttcgctgaccttcactaactggaagcggcgcgacagggcggcgtctttctcgaagtattttttgtactcgctccaggtggtggcggcgatggttttcagttcgccacgcgccagcgccggtttcagcaggttggagatatccagcccgccctgctggttgcccgcgccaatcagggtatgcgcttcgtcgataaacagaatgaccggcaccggagaggaaatgacctccnccatcagccccttgaagcgtttttcaaactcacccttcaccgatgccccggcctgcaatgcgcccaggtcaagggtcatgatatcggtgtttttcagtttgtccggcacctggcctgccacgatgcgcagcgccagcccttcaatcagcgcgcttttacccacgcctgcttcgcccaccaccaccgggttgtttttacggcggcggcagagaatgtcgatcatcaggtcgatttcgtggtcgcggcacagtactgggtctagcctgccgttacgggcgtcttctgtcatgtttttggcgtagcgggcaagcagggtgtcagaggcgtccgtcagtgtgcctgcgcctttaccgtctgcatccggcacgactgattccgccgactcctgtgtccactgcacaaagtcctgttgcagacggtcacggttaatgccggtcaacagccgggcggcagcaggcggtatataacgcagcggcgaatgcagcaaggccagcagcaacacgccgccgcgcagttcgctgtgctgcatctcagccgacgccagcagccagccctctttaagccactcaaccagcatcggggaaaacgccgggtagctgtccgcagaacgggcggttgtgtagttctctaccgtcaacgcctggcgcaactcttccatgccaatatcgccctggcgggtaataacccgcaggtcactgcgtggcatggcgagcatctgaataagcacatggctgacggtaatttccgctgcctgctggctcatacattctgaggcggccatctccagcgcctggcgggagaacaggttcagccgttttaccagcgtgggaagatcaatctggatcataaacgtccttatcgaagtaatttgtttagctggtgcaggatgtcctgcgtctggctgtccagccgcaacagatagaacaggtaaaacaacgccagcacgacaacgccaccacaaaaaatatgtttaacagtcaggcgactgatgagctgataacgcccgccctgggtttttttgtcctggtgtaacagcgggaaaggggcatcgccgcgcagtttatgcagaacgtggtacagacggcggtagatctgctcaaattccccctgatcctgtactgccactttgtagcgcccgcgaaatcccagagaaaaacagagccagagaaattccagcagatcctggtaacgtttgggttcacggatcaggcgctccagcaggatgaaaactttctcgccaccccaggcttcgttgtggaaatggaccagcaatgactgcttgatccactcgttcttgttcgaccagccgttaccgagcgccgcttcatcaataaacgtgcagaggatgtagcgaaacgagataatcacgcccggttcgtagccctgttcctgaagcagttgctccacggcctgaacatctgtcaccacctgagcaaaaagatgctccggcatcgtctggctgttcatggtggaaaggcgcattaccataccgagtagcggcgtcgccgcgtcgatcatcggattcaggctgttgccacgaagcgcgagatggtagtcgcgcaggcttttttcgtcgtatccggtaaatggtggcagagacagtgacccctcatccatcgtcttaccctcttatcgcccacagttgcatgttcagatccgggaaactgccggatacatgcagtgcaacggccccggcggcagccatttctgtccaggcctggccgctcttgtcgagttcgaaatagctgaacccggaatggtagggaagctggcggggggccaccatcagtgcgcgcagaggaatacccgggatctgcacactgaccatattgcggattttttccggcgaggaaattttcgactgctggataaactgacgctggatctgatcgacaggcatatttgctgccacggccagtacaaaggtggcagactgtagcagttccgagtcatgaacatcggcctgccagatgccgtcacgcagatgcagcggcagattgaccgctcttggcgacagtacggtatgcagcgcccgtttgacttccggtaacagtgttttaaatgttttggtcaggtcatgatgatcatacacatcaagcgggcagggcaggcgtgacggctctgtaaaggtcatcagttcacccagcaacccggcaagatcaaggtagaaatcttccgggtggagctgggatcggcgggcgcgatgggtaaaccgggtctggttacggttaagcaactgcaacatcataaattccgccacatccgcgatgccgctctgcgccggagagccaatacggtttgccagatcgcttgcccgtccgccaatggccccctgtacctctttgagataaacacgcagtttcttactgacctgaatattctggcaggaggggataaaatcgtcatccagcgtcagggagccgtcggcatggcgatcgctgatacggcaaagcgggagcgtaatataggcactcatatcttctgcaccgctcataatgcgcggcgtcagttgtcccagcgtcagtgttcgcgcgtcgccttcttctgaatgcagatcccggacatcggcataattcagccggtaacgcccgattcgccgcccgtcgctgatttcatttctcacatcactggcgaccggcagagcgaggtaaatattgcggcttcnnnnnnnnnnaanattttgcgggtacagcggatcgggcagtgcgtcctggtcggggatagaaaagacggtgccgtcaggcagtgtgcctgacgcgctgtcaatcatgatcttaccctgcgccagcagttcattgttgagggtgagttcggtaaatccccaggataaatcattcatggcccggaaacgctggttatccaggtagtcgttgtaacgctgctgttgctggaaatggtgtgggcgcatcagcatcccttcctgccacatcaccttgttgcgggtggttgccataattattcatcctcttttttcatttcgatgctgctttgacgtacatgcaccagcaggcggtaatggtggccggttccttccaccgtctcgatttgtttccattcagtggtctggtcatcggagaaataggccacgacaccaataaactgcgttttctcatccagctttatcggcggcagggttttgatggtgtccggcaacaggttgaaatcctggtggtcgatatagtttttacccagcacatccggtagcggcgtactggctatctggtcatagtcggctgcctgcaattttgagtcgtcagtcaggtacaccagttgcacatccacggcggctgattcaccctccgcattggtattggtgtccggttcagtcagcagggtgacggttatttccgaaggttgctccttcaggctcccgacctggatatccgggtttttgatcacctcgctgatttttttcgccgtttcgcagccggttaatatgacgcacatcagcacgcaggccagaaacgccttcctgttcatgcttccggctcccgctgtttttcacgaagcacccggtcatagacctgggcgtagacctcgttaaacagcatctcaaacccctgctggcgatcggaggccagttcttcgtaataatggctgtacatttgccatgctccggcatcatccagcggctggcgcagttcatggctgcggcggtactgcacnnnncggcgcagcagattttgtggtgagaaagcatccagcaggacacgaagcgactccacaatcgccgcccggttagcttcttcgtggtggcggacattgcgcaggctttcactgacggcggcgggagccgccagatgtaccgggcttttaccttcggcaaacatcacgtcgagcgcggtggcgtaatccatgttcaggcgcagcgggttatcttccagcgggcgcaaatgtttgtctgagaggctgttacgctgctgctgcaaatcgagcagaccttttattgcggcctgtaacgttcgtccggcctcctccagaaaatcatccgcatcgtcggaattgctcacggtaagcgagccgccaagaccgcgcagtaagggggggaccgcaaggtggcgttgcgccatttctgccgcagagatgtcatcattatgatcgccagggctggcataaatgggcggcagatccataaacggagtattgatccccccattacttgccggatcggacagcggtgccgatggccggacagccgcaatgcctgaaagcggatcgcccgtggtaatcaggctttcggactgaagtgcctggagtggatcggcagaaaaaccatttaccacggtgtctgcaagctggtgccggtgagtcattcccggatagtgtggcgcaccctccgttgatagcagggtatccgtgagcatatcgcgattggtaacgatggtttcgggagtggccatttcctcatcgtaatggggaatatctccccggttcagatgaaccctcaccatcagccgtccgatctggatctcatcgccctggcgcaactgtatcaggtctgatgttgctgtgacttttgcctgattcagccacagttgtgccgtctgcgggcgtagacaaaatgtgccatcgtgcaggataacggtaaaagcctgggccggaatgctctgctgacgatcctgtaccgaccagtggcattcgggggcatggccgacatttccctgctgtgtgaacagacagcgcgcsgcccgcccgctttccagctcactgccgttaatgacctgcaatgaaagcgtctgtagtttctcttccggcatattctgctccgtgattatcataatttacgaccgtaccctgatggtgactgagggtcgttcttccggtgtgccgaggaagctggtccagcccagcagcgcacttttgttatcgcccaggcgcattgcgcccacctgctccggcgccagccccagatgtaagtcccaggcaagctgatcgcgcaggatgaaggacacgaacgtcgtcagtggcaggaagttttcgccggacggcagaaaagagaggaactgttttcgggttaggctggtaatactgagctggaattttccgctgagatcgggtactcgtgtacccagaacaaagttgcccagtaccgatcttcccgccagtttttcgccatttttaagagaatagctccccaggctgttttgctgatccggttcaatatccaccttgcgacgttgccagttttgcagcgtcacttctgacaaatcaaagcagtgggacaccaggccacagataatttccggggatcgtcccggatttgccaggatcccggaatacgccagcattttgctgtgattaatcgccagcttatcgcgaagctggcggtggcccagcccgacaagggagtacatgcgctgcgagaacgcatccacaccgccgttacgaaaactgatgtgatagcggtacttacgccagatatgccagacaaactgggtcaggcggtggctgaacatatccagaaaatcacctaccggactttgttcatgtaccgctttccaggccaggtgatcgaggtaataaccggggagaggcgactggctcccctgtaaccccataaaggtagtggtcatcctgaatgcccctgacgtatcccgtttcagcgcactgatatcactgcacgggaaggcaaggctggcatcggcgctgaaacgcagggtttcctgtgccggatcgtcgcgcagggataattctggcgtccccttttcaccctttgccaggcggtgcaacagctccgccatcgcaaaaaaattgtaagagcaggcattatggaaaacctgtgccagcggatcattctgctctttatctgccgggggatttcccggactcagataagaggatgctgcccgattctttccgtccatttccatgtctcctggctttctgtgttcacaacggtcagcatgtggaatgagttaacgctggcgtacagcgacagaaaatgcgaaagcaccgtaccgagcagatacatttccccttcacagacaaacggctccgggtgcagatacagcgtggaggccagtccccggacgggaatacccgtaaacaggcgatcaacggggcgggtctccagacgctcaatggcatccagcttttgttgtgacagccgcgccgtctgcggatggtggattgcgtggcgatcaaagttggcgatgacctgcttcagcgcgtccgtatccagtaatgacagataattcaggttcatggcggagagcagggaccagtgcaggctgccatcaatgaccggccagagtggttgcgtcgggcgggtaatgttgcgaaaggaagcaacagccgcatttttaccggttgtgccggtgatatcgccggaacgaatttgtgacggaagctcacggttggtacaggtcagcgataccgaaaccacttcattactgagcagagattcgtctgacggataactgccatcagcatgtataaaggcaagggtatgatcaaagccgcgatggaacagggatgttttggtccggtgatgccagtacaccacttcccgcttccggctgtattccatctgatggctgaaactttcaaaggctggccactggcgcgcggcctgcgtcgaaacaggacgccccagatcttttttcctgaacatatcctggacctggctcaccacactgttaacggaaaatacatcgtaatgttgtgggtaatggcggctgggaaccagcggatagtctgcccgccggttgtccagcgtgatggcttctgcatggtggataaataaattaatggcaggtgcgcaatacaggcgcagggaatcgcggcgcagccggatgtccacgggcaaagggcgcgaaaaacgcagttgcagggtaaagaattccgcctgcaatccgtcaggcaaagccggacaaccacaaagatcaaaaaagagaaacgcatcggggtaacagaaatactcctgaaggatccggtagccgctgtggacgtttttcggccagggcagcatggcatcctgcggctcaaaaccgacagcttttagcataaactcaggcaggcgaatatgctgttcacccacagtcaggtcggcaccctgcaagtattcgcagaaccataaataaagctggtcacgggtatagttgtcgtcattgccgagccagaagcgaagtttgttcagatccagcgtgcggaagtccgttcccggtgcgaccgaaaaggtgatgttgataacaccattacgggtcgtactgcggttttcaatctgctccaggcgaacgggcagcagccagatatcccggcagagggtgaaggtacagggaggcggctcctcctttttagcatcagagggcagcacttcatcaactctgatttccccggcgttggttgtaaactgctcattacgggggattaacaccggtacagaagacttatccatatccggcgtatattcaataagggtcattgccggaaccggacgcaggtaattaggccatagcatcttaataagcccgtgcgtcagttctgggaattcatcctcaattttctggcggagattgccggtaagaaaagccaccccttccagcaggcgttcaatatccggatccgcatctttttcggccaggaagcgggccagatggggtttttccgttgccagcancttgctaagctggcgcaggtaatcgagttcttcccgaaaatagcgttcttcaaattccatttgtcagtccacccggtaatgctggctgccattcggtgccatatcaaattcaagcacctcatgcgtttcgttaaatgtcacccaggctgtaatatgaaacgtcatatccagcgggctggaggcggatgaaaccactgcctgcacttcagcgtgtgagatccggggttcatagcgttctatacattgctcgatggcccgactcatgaattcgcggaagttttcagccccttccggttcatcaatgcccagctcaggcgcaccccggcaactaccggaccgggtattaagaatgtttcttaggttctggcgaatggattgcctgagcgaatgaatactgcctccctgccggtttctggccgaagaggcttccatacgctcaaaaagagaacctgtggttctttcccgatccggtatcatggtgtgttactccctgtctaaccggccaaccagggaaagctcaaaatttgccccnntanntntaaaannannnctcacgcttagcgcaacctggtaccagccgggttcgccttctacatccataacctcaactttggcagcgcgcagaggtttgcggctgcgcacgtctgcaggcgggttttcctggtcggcaacatactgacggatccaggtattaagctctctttctaagtcgctcctttctttccatgaccccagttgttcacgctgcaacaccttgatgtagtgcgctaaccgattgatgatgaagagataaggaagctgcgtacccagcttatagttggtttctgcatcttttcccggaaagtgcttcggtttttgtaccgagtttgcagagaaaaaggctgcattatcagagtctttacgcatggtaagggtgataaaaccctcttcagccagttcaaattcgcggcgatcggtgaccagcacctcggttgggattttggcctgaatctgccccatcgtttcgaacagatgcaccggcagatctttcactgcgccgccgctttgcggaccgataatgtttggacactagcggtatttggcaaaactgtctgcgatattgcatgccagcatccaggccgtattaccccacagataatcttcgtggttctggctgacatcttcgtaatagttaaagttcttaacagggttatctgttggtgaatagggctggcgaagcaggaagcggggtgccgtaagccctaaatagcgcgaatcttccgagtcacgcatggcgcgcnntttggtgtaggccggaccttcaaagatggcataaagatctttgatattaggcagttcggtccacgagttcagccccataaactccggggaaaaggaggacaggaacggtgcgtgcgccattgcgcccacggcactgacgtattgcagcagtttcatgtcaggcgcggtatttttgaactcataagcgcccagcacggcagcgatgggttcaccgccaaactgtccgaaaccggacgaataaacgtgcttataaaatccggactgaataatttctggcgcaaactcaaagtcttccagaagttcctgcttggtgacatgaagcacgttgaccttgatgttttcacggaaatcaacgcgatccaccatggttttcagtgagcgccagaacgactcgacctgctgaaaggcaggcgcatggatgatgacatccatctggcggctgatgcgttcatcaatatctgcaatcatgctgtccacggccagtttattgaccggttcggcagatgcagtggattgcaggatgctggcaataaaggctgtcacaccctggcgggcaacgtcataaccttccgaaccgggctgaatacgggtctgtgccatgatttgatcaagcagcgacgattcctgctcaggctgcccggcatgactggaaacgagttcctcttcctgtaaagacatactgaaaatccttctgttttagctgtgtttctgaaaccggcttttcgccgtcagtgaagtacgcgctgccagtgcgacgcgctctgctgaaactcacaaaaatggataatctcatccaatagatcactgatacggcgatccagtgttgtaatcagcgcagccacaccatcctggttgatttcaacggacgggctgaaacatacctggtaaaccacctgcagaatgtctgcaacagagaggtggtatgtcccggagatatttttgtgtgccgtcatgcctggataaccctgtttaatgaaatagtggtggttatttattgctcacctggccgatttctttgagcaactgctcgcgggactcttcattttccagcaatgcctggagctgggtacggaatgccggaaggttacccatcggccccttcagtgcagtcagtgcttcacgcagttccagcaatttattcacttccggaacctgccgggccacgctatctggtgaaaaatcatccagtgacttgatattcagcgccacattcagttcatcgtccgttgtgcttcccttcagcgtggcggggacggtaaaattgaggccaatggctgcttcagccatcactgcaccgaaattgtgcttgttaacggaaactgcctgacgttcatccagtgaggatgtttcctgcgtatttccggtatcgccgacaacgagcatgttaagcggaagttccacttcagccgtctggccatctgtttttgggacatacgatatattaatacgttcgcgaggcgcgacgctgccttcaaattttttgctcataaaagtgatccgtcatgttatctcgtacaggccatgaacacggcatattcgtaccgcaaaaaatatcggaaatgccgtcttgatggcggtgaaaataaaatcaccactccttcatcaccccgcattttacgcttcaaaataaataagaaaaggactttttatcgatcgtaaagaggggtattctgcaagcgttaaatagattttatgaacctgtgtaattcgcgtcaggtgtattatggcaataatttaaatatagagttttttatgtatcttattgaattatataataattttattaaacataagctaatctaatgattgcttgtttatatatttgttttgtgattgattaagtgggtatttttaaggaatatctcaaaaattatcaaaatgataattcagaaaggataaatacaatatttattcatgattcagctttggccattttatggaggcaatacggactttgaacagttgggtatggttatccagatatatattattaagttattgctgaataagagatttaatgattttaaaaatagtttttacgacaaccgtaaattctagctcggtttgtatgtaaaaaatactgaaaaatgatgcggttccgtgaagtgagctgcatctgcctgtctgggattaacggcaggtcattgtaagtagtaattaaccacgttaacaaggagtttacaaatgccaacaccgtgttatatctccatcactggtcagacccagggaaatattactgcaggtgcatttaccgctgattctgtcggcaacatctatgtgcaggggcacgaagacgagatgctggtgcaggaattcctgcataacgttactgtcccgaccgatcctcagtccggtcagcctgcgggtcagcgtgctcacaagcctttcatttttaccgtggcgctgaacaaagcggttccgctgatgtacaacgcactggcctccggcgaaatgctgccaaccactgaacttcactggtggcgtacctctgtggaaggcaaacaggagcattatttcactacccgcctgactgattcgacgattgtcgatatgaaactgcatatgccgcattgccaggacccggcgaaacgcgagttcacccagttgctcgaagtttcactggcctaccgcaaaattgaatgggaacacgtcaaatctggcacctccggtgccgacgactggcgcgcaccgctggaagcataagttaagccaacagcatccggctatcaggccggatgctgtttttgtattacgccgtagaaagaaaggttgtcagtaagggggtacgttcacgggagatggcggctgccggaaacttcggcggtagcgtgcctgaacgcaagcgtagcactgtactgtcacagccgctttaacagcgaactgtctgtttttccttaaccccggaggttgctatgtcaaccggattacgtttcacgctggaagtggacggcctgccaccggatgcttttgcggtggtctcctttcatctgaaccagtcactctcttcgcttttttccctcgatctctctctggtcagccagcagtttctctcccttgaattccagcagatcctcgacaaaatggcctacctgacgatatggcagggcgatgacgtacagcgccgggtgaaaggtgtggtgacctggtttgaactgggggagaacgacaaaaaccagaagctgtacagcatgaaggtatgcccgccgctgtggcgcacagggctgcgccagaacttccgtatcttccagaatgaggacatcgcaagcatcctcggcacgatattgcaggaaaacggggtgaccgagtggagcccgctgttcagcgagccacatccttcccgtgagttttgtgtccagtacggtgagactgattacgatttcctgtgccggatggcggcggaggaaggcatcttcttttatgaggagcacgtgcaaaaaagtaccgaccagagcctggtcctgtgcgataccgtgcgttatctgccggagtcctttgagatcccctggaatccgaacacccgtaccgaggtaagcaccctctgcatcagccagtttcgctacagcgcacaaatccgcccttcttccgtggtgaccaaagactacacctttaaacgccccggctgggccggacgttttgaccaggaaggccagcaccaggattaccagcgcacacagtatgaagtgtatgactatcccggacgtttcaagggcgcccacgggcagaactttgcccgctggcagatggacggctggcgaaacaacgcagaagtggcgcgcggaacaagccgttcgccggagatatggccgggacggcgaattgtgctgacggggcatccgcaggcgaacctgaaccgggaatggcaggtggtggcaagtgaactgcacggtgagcagccgcaggcggtgccgggacgcaggggttcaggcaccacgctggataaccattttgcggtaataccggcagacagaacatggcgaccacagccgttgctgaaaccgctggtggacggcccgcagagcgccgtcgtgacgggaccggcaggcgaggaaatcttctgtgatgaacatggccgcgtgcgggtgaaatttaactgggaccgctataacccgtcaaaccaggacagttcatgctggatccgtgtggcacaggcgtgggcaggcaccgggtttggtaacctggcgataccgcgtgtgggtcaggaggtnattgtggacttcctcaacggcgatccggaccagccgatcattatggggcgtacctaccaccaggaaaaccgcacacccggtagcctgccggggacgaagacgcagatgaccattcgttcgaaaacctataagggcagcgggtttaatgaactgaagtttgacgatgcgacagggaaagaacaggtctacatccacgcgcagaagaacatgaacaccgaggtgctgaataaccgcaccacggatgtgataaacaaccatgccgaaaaaataggtaacaaccaggcgatcaccgttaccaataaccagatcctgaacattggcgttaatcagatacagacggttggtgtcaaccaggtggaaacggtaggcagtaaccagattatcaaagtgggatcaaaccaggttgaaaaggtggggatcattcgtgcgctgacggtgggtgtggcgtatcagacgacggtcggcggcattatgaatacctcggtggcgttgttgcagtcctcacaggtagggctgcataaatcactgatggtgggaatgggctacagcgtcaatgtagggaataacgtcaccttctcggtgggcaagacgatgaaggaaaacaccggacaaacagcagtttattctgccggtgagcatcttgaactctgctgtggtaaggcaaggctggtgctgacgaaggacggaagcatatttcttaatggtacgcacattcatctggaaggggagtcggatgtgaacggtgatgcgccggtgattaactggaactgtggtgccacacaacctgtaccggatgcgcctgtgccgaaagatttaccccccggaatgccggatatgcggcaattttgagtcaggtgcaaaaaatcaaaacggaactggtgcagtgaccagataaaccatattaaaagcagaaggaattgattcatgggaggaaaaccagcggcgcggcagggtgacatgacccgcaagggactggatattgtgcagggttcagcaggggtgctgataggtgcgccgacgggagtggcctgttcggtgtgtccgggagggattacctatgctaacccggtgaacccggtgctgggtgcgaaggtgctgccgggcgagacggaccttgcgctgcccggcccgctgccgtttattctttcccgcgcctacagcagctaccggaccagaacacccgcgccggtgggggtgtttggtcccggctggaaagcgcccttcgatatccgcttacagatacgcgatgaaggcctgatactcaacgacaacggcggcaggagcattcactttgagccgctgtttcccggcgagataagctacagccgcagcgagtcgttctggctggcgcggggcggggtggcggagcagcacagttcgcagccgctaagcgcgctctggcaggtgctgccggaagatgttcgcctgagtccgcatatgtacctggcgacaaacagccttcaggggccgtggtggatactcaactggccggagcgggtgccgggggcggacgaggtgctgccgccggagccgcccgcataccgggtgctgacgggcgtggtggatggcttcgggcggacgctggcctttcaccnggcggcggagggtgatgtggcgggcgcggtgacgggggtgacggacggcgcgggnngccgttttcacctggtgctgaccacacaggcacagcgggcggaagtattccgtaaacagcgcgccacgtctttatcttcccctgccggtccccgttctgcttcctcttctctggttttccccgacacgctgcccgccggtacagaatacggtgccgataacggtatccggctggaggcggtatggctgacacacgacccggcatacccggatgaactgcccgccgcgccgctggcgcgctacacgtacacggccagcggagaactgcgggcggtgtatgaccgcagcgggacgcaggtgcgcgggtttgcttatgatgcggagcacgccgggcgnnnnnnnnnncaccattatgcgggtaggccggagagccgctaccggtatgatgataccggccgggtgacggagcaggtcaacccggaggggctggactaccgctttgagtacgggcaggaccgtgtgaccatcacggacagcctgaaccggcgggaggtgctgtacacggaaggcgagggtggcctgaaacgtgttgtgaagaaggaacatgcggacgggagcatcacccgcagcgagtatgatgaggcggggaggctgaaggcacagacggatgcggcgggacggcggacggagtacagcctgcatatggcgtcgggtgcggtgacagcggtgacggggccggacggcaggacggtgcggtatggctataacagccagcggcaggtgacgtcagtgacgtacccnnnngngnnnngcagcagccgggagtatgatgagaagggaaggctggcggcggagacctcgcgcagcggagagacgacgcggtacagctatgatgacccggcgagtgagctgccgacagggatacaggacgcgacgggcagtacaaaacagatggcatggagccgttacggtcagctgctgacctttacggactgctcggggtacacgacgcggtatgagtatgaccggtacggtcaacaaatcgccgttcaccgggaagaaggcatcagcacttacagcagttataacccgcgtggccaactggtcagtcagaaggatgcgcaggggcgtgaaacccgttatgagtacagcgccgcaggcgacctcaccgctatcgttgccccggacggcagccgcagtgagatacagtatgatgcgtggggaaaggccgtcagcaccacgcagggcggtctgacgcgcagcatggggtatgacgctgccgggcgcatcaccgtgctgaccaacgagaacggcagccagtccacgttccggtatgacccggtggacaggctgactgaacagcgcggttttgacggccggacgcaacgttaccactatgacctgaccggaaaactcacgcagagtgaagacgaggggcttatcaccctctggcactacgatgcgtcggaccgcatcacgcaccggacggtgaacggcgacccggcagagcagtggcagtatgatgagcacgggtggctaaccaccctcagccataccagtgaaggccaccgggtgtcggtccactacggctatgacgataaaggccgcctgacgggtgaacggcagacggtggagaacccggagacgggggagatgctgtgggagcatgagacggggcacgcgtacagcgaacaggggctggcgacccgtcaggagccggacggtctgccgccggtagagtggctgacgtatggcagcggttatcttgcggggatgaagctgggcggaacgccactggtcgagtacacgcgggaccggctgcaccgtgagacggcccgcagcttcggcggggaggcatatgaacttgccaccgcctggaataccagcggccagctnnngagcaggcacctgaaccttccgcagcttgaccgtgactacgactggaacgacaacggacagctaatccgcatcagcggcccgcaggagagccgggagtaccgttacagtgacacgggaaggctgacgggcgtccacaccacggcagcgaacctggatatcgatatcccgtatgcaacngacccggcaggaaaccggctgccggacccggaactgcayccggacagcacnctcacggcntggccggataaccgcatcgcggaagatgcgcactatgtctancgctacgatgaatacggcaggctggcggagaagacggaccgnatcccggaaggggtnatmcggatgcacgacgagcgcacccaccactatcactacgacagccagcaccgyctggtgttcyacacgcggatacagcacggcgaaccacaggtggagagccgntacctctatgacccgctgggccgccggacgggaaaacgggtgtggcggcgggagcgtgacctgacggggtggatgtcgctgtcgcgtaaaccggaggagacctggtacgggtgggacggygacaggctgacgacggtacagaccgacaccacgcgtatccagacggtgtaccagccgggragcttcacgccgctcctgagaatcgaaacagagaatggtgaacaggcgaaggcgcggcaccggagcctggcggaggtgttgcaggaggacacgggkgtgacgctaccggcggagctggcggtgatgctgggaaggctggagcgggarctgcggcagggcagcgtgagtgaagaaagccagcagtggcttgcgcagtgcgggctgacggcggagcagatggccgcgcagctggaggcggaatayatcccggagmggaaacttcatctttaccactgcgaccaccggggactgccgcnggcgctcatcagcccggaaggggaaacggcgtggcagggggagtatgacgagtggggaaacctgctgggcgaaaccagcgcgcagcaccttcaacagtcactccgtctgccgggacagcagtatgatgaggagtcggggctgtaytacaaccgcaaccggtactatgatccgttgcaggggagntatatcacccaggayccgatagggctggaggggggatggaacctgtatcagtacccactcaatcctattgaacatatagatccgttggggttagcacttgatttgaattattattctccgtcagatcctatatataaaggttctcttaatgtaagggaatttccaacgggttttacagttggaggtcatggttcgcctacatctatgagtgatgacagaatcaaaaaaggaagtgatctgacaataaaacaattagctagcgacataagagcgaatcctaaatatcatgaaggtatgcctgtagtcttgttttcctnnnnnnnnggaaaaggcaaaaattcatttgcacagaaactagctaacgaacttgatgctacagtgattgctcctgatgaaataatatggatttggccggatggaaactatgctattatggggcaaacagctaggataacaataggcggtaaggacaacggggtgtttgaattggtgccagacgagaaacaaccaggggactttcataagtttacacctacaggaagcaaatagtaatgaaagtatttacttttttgttgattatcatggtatgtctttataactttggagtgagggctgctatggataactcaaaacattctgatgaggcggaaaaattattggcggagctttctgctagaanngnnnaagnngaaggtgaaccaaaatcaacagtaagcgtcttttatttgcagccagaagaagtaaatactttatcacaccaggcaaaacgaggcgatggcgaggcgggttttaggttgttcttgtactacaagttgtccaattatgatgaagaaaaaagtagtcagtggttaaaaatagcggctaataatggtcatgcgacagctcagtatcggttatatgtagagttacaagaacaaggtgaaaccaaggaagctaatgaatggttacaaaaaattaaattggctgccagtaataatgacagttcagcaatatggttcttggtgaattgttataaaaaccagggaaataaaaaagaagcattgcaatgggcatataaactcaaagcgagtaaacagccgcttgatgcagatcgactaattgaagaattaacgaaagaacaaaagtagctttaaacaggtaacagaaaaatggagagtagaaaaactttaccagtcgctacaacacctacacacaaaattacgtttacgacgactgcaacaagctcatcaaagcgcaagttgaaaccaaaactggcatcttcgtcgccggttatcattacgatgtacttggcagatgcatcaaaagtcgcaagagaaaagatgaaaatatagctttttgtatcattaagtatgtggccagcacatgactcggcatagatcttatgactaagattctacaccccaaacctaagtatgggccaaagaagccgtttggttcattttttatatctccagcattttagtggatggagcttatgaaaataataaggttattattgctggcttgttcgataaccattcatttttttattgtaaaagaacatgtatttaaaatattcaatcaacatgcttattattttttgtttgctttttatgttttgatagcgttctgttttttnnnnnnnnnnnnnngatcttttattgttgatttaatagcttgtataataattccttatatttcttctgtcataagtttcttgtttttgtccatgttaatatctcctcacctcagggaaagatcacctaacgccgcttttttgtactaaataattcgcactaaatgttcaataattgagatgttccttattatctaaaactgtttttcacagcttacatatgatcaaatactccttgcataaataaggagaacaaaatggaacttaaaaaattgatggaacatatttctattatccccgattacagacaagcctggaaagtagaacataaattgtcagatattctactgttgactatttgtgccgtcatttctggtgcagaaggttgggaagatatagaggattttggtgaaacgcatctcgattttttgaggcaatatggtgattttgaaaatggtattcctgtccacgataccattgccagagttgtatcctgtatcagtcctgcaaaatttcatgagtgctttattaactggatgcgtgactgccattcttcagatgataaagacgtcattgcaattgatggaaaaacgctccggcactcttatgacaagagtcgccgcaggggagcgattcatgtcattagtgcgttctcaacaatgcacagtctggtcatcggacagatcaagacggatgagaaatctaatgagattacagctccccctgaacttcttaacatactggatattaaaggaaaaatcatcacaactgatgcgatgggttgccagaaagatattgcagagaagatacaaaaacagggaggtgattatttattcgcggtaaaaggaaaccaggggcggctaaataaagcctttgaggaaaaatttccgctgaaagaattaaataatccagagcatgacagttacgcaattagtgaaaagagtcacggcagagaagaaatccgtcttcatattgtttgcgaagtccctgatgaacttattgatttcacgtttgaatggaaagggctgaagaaattatgcgtggcagtctcctttcggtccataatagcagaacaaaagaaagagccaaaaatgacggtcagatattatatcagttctgctgatttaaccgcagggaagttcgccacagcaatccgaaaccactggcacgtggagaataagctgcactggcgtctggacgtggtaatgaatgaagacgactgcaaaataagaagaggaaatgcagcagaattattttcagggatacggcacattgctattaatattttgacgaatgataaggtattcaaggcagggttaagacgtaagatgcgaaaagcagccatggacagaaactatctggcgtcagtccttgcggggagcgggctttcgtaatcttgccctggctgcaccgtgagacggcccgcagcttcggcggggcgggcagtacagcggggtacgaacaggtcacggcgtacaccctcacagggcagctacagagcaggcacctgaacctcccgcagcttgancgtgactacgactggaacgacaacggacagctaatccgcatcagcggcccgcaggagagccgggagtaccgttacagcgacacgggaaggctgacgggcgtccacaccacggcagcgaacctggatatcgatatcccgtatgcaacggacccggcaggaaaccggctgccggacccggaactgcatccggacagcacgctcacggcgtggccggataaccgcatcgcggaagatgcgcactatgtctaccgctacgatgaatacggcaggctgacggagaagacggaccgcattccggaaggggttatccggatgcacgacgagcgnacccaccactancactacgacagccagcaccgcctggtgttccacacgcggatacnntacgnnnnnnnnnnggtggagagccgntacctctatgacccgctgggccgccggacgggaaaacgggtgtggcggcgggagcgtgacctgacggggtggatgtcgctgtcgcgtaaaccggaggtgacctggtacgggtgggacggcgacaggctgacgacggtacagaccggcaccacacgtatccagacggtataccagccggggagcttcacaccgctcatccgcatcgaaacggagaacggcgagcgggaganagcgcagcgccgcagcctggcggagaaactccagcaggaagggagtgaggacggtcacggtgtggtgttcccggcagaactggtgaggatgctggacaggctggaggaagaaatccgggcagaccgcgtgagcagtgaaagccgggcgtggcttgcgcagtgcggactgacggtggagcaactggaaaaacaggtggagccggaatacacgccggcgcgcacgttgcatctgtaccactgtgaccaccggggactgccgctggcgcttatcagcgaagacggcaatacggcgtggagcgcggaatatgatgaatggggcaaccagcttaatgaggagaacccgcatcacctgcaccagccgtaccgtctgccgggccagcagcatgatgaggagtcggggctgtactataaccgtcaccggtactacgatccgttgcaggggcggtatatcaccccggacccgattgggttgagaggtggatggaatatgtatcagtatccgttgaatcccatacaagtgatagacccaatggggttagatgcgattgagaatatgacatcaggtggactaatttatgccgtatctggtgtacctggattgattgttgcaaacagcattactaacagtgcttaccagttcggttatgatatggatgctattgttggcggagctcataatggggccgccgatgcaatgagatattgttacttgatgtgtcgaatgactaagacatttggatcaacaatagctgacgtgataggtaaaaatcatgaggcggctggggatagacaaggtcagccagctaaagaaagaatcatggatcttaaaaataacactgtcggtattgcttgtggcgatttttctgccaaatgtagcgatgcatgtattgaaaaatataacattgggcaactcttcgggttagatggtataaaagcagataatccaataaaagcaaagcaagggagttcagatgcttcaaattattagaggcaaacttgtcatttttttaattaccctttgtttatttgttgtttaccttgggtttgataacaattcaaattctgacatcgtattttatggacataaaacaccaaagagcgttgagatatatctttctgaaaaaatattatttataaaataattaatgaccaaaaaattagtagagggaatggtcattttataagtataatggttaataattacaagacgcactgtggagtggttgatataaatcttaattttttcaatgatattctttatagcgtgcgattaaaaaacattagtaaactggagaatatggagttctgcgctacaaaacaacgggtgtattttagtgataaaaacaagaaggctagttataaaataattaattatggagactattatgatgttgattattatgataacaatttgaaaaatgaagtttttgactggattggtaaatggtcataatgaacaacaccagaaagagaaaaatataaaatacatacagaaagacatgagagcaagggacggggcagggcaagatcatgaaaatcgtgatgtaaatcncgattttcatcctggctttaacgcctacaggtgatcaaaatttaacctttggaataactaaaaagataaaaaggacgccaggtgagtattcaaagtttgcttgattatatttcagtgatccctgatatacgacaacaaggaaaggttaaacataaattatctgatattttgtttctcaccgtatgtgcagtaattgcaggtgccgatgagtggcaggaaattgaagattttggacatgaaagacttgaatggctaaagaaatatggtgattttgataatggcattccggtcgatgacaccattgcacgcgttgtgagtaacattgacagtttggcctttgaaaagatatttattgaatggatgcaggagtgccatgaaatcactgatggtgaaattatagcaatagatggaaagaccataagaggctcctttgataagggaaaaagaaaaggagcaatccatatggtgagtgcattctcgaacgaaaatggtgttgtactggggcaggtaaaaacggaagccaaaagtaatgagattacagccattccagagttgcttaacctactggatttaaataaaaatttgataaccattgatgctatgggctgtcagaaagatatcgcttcgaagatcaaagataaaaaagcagattatcttctggcagtaaaaggcaatcaggggaaattacatcatgcattcgaggaaaaatttcctgtaaatgtgttttctaattataaaggcgattcgtttagtacgcaggagataagtcatggaagaaaagaaacacgtttgcatattgtcagtaacgtaacgcctgaattttgtgattttgaattcgaatggaagggattaaaaaagctttgtgtagcattgtcattcaggcagaagaaagaagataaatcagcagaaggtgtaagcatccgatattatatttcatcaaaggatatggatgctaaagaatttgcacatgctatcagagcgcactggctgatcgagcacagtcttcattgggtgttagatgtaaaaatgaatgaagatgccagccggataagaagaggaaacgcagccgaaataatatctggaataaagaagatggcactgaatttattaagagattgcaaagacattaagggtggggtgaagaggaaaagaaagaaggttgcgttaaacacatgttatatagaagaagtgcttgcatcctgctcagagcttgggtttcgaactgacaaaatgaaaaatttaacacagatttaattcatgctcttgccctgcggggggattattaaatcttcccagttttttattatttaactctcgctcagcacactaaacatccctttctgaattccccgccctaaatacagcccccactcaccgcaacctaaactcatccgcatcccgccatgccggaaacttttctctatattcccgcaatgccaccatcgacagctccgcatcaatgcgcgttgcctgatgcgcgtcggcagtagcgataatctcgccttgtggattaatcacccggctgtcaccgcgataatggcagccgttgccatcgctgccgacgcgattgcatcccgccacatacgcctgattctcaatcgcgcgggccgtcagcaatgcctgccagtgcagagagcgcggagcaggccagttggcaacgtagatggcgaggtcataatcgttgagattgcgcgaccacaccggaaaacgtaagtcgtagcacaccaacggcaaaatacgccagccgcgccattccacaatcactcgcgcattgcccgctttataatgnngatgctcatctgccatgcggaacagatgacgcttatcataaaaatgtaccgtgccgcccggctcaaccagcaaaaagcggttaaccgaaccagactccgtttgtaatgcaacactgcctgcaatcagcgcattgcactgctgcgctttggctgtcatccagttcactacgtcatcttgtgctagcgacgaagcagccgcttccatggcaaagccgctggtaaacatctccggtagaacgatcacatcgcgcccggtaataccttccagttgacgatcaaaatgacgcaggttggcaggaccatccatccacaccagtggttgctgcaaaagcgtaatcttcaaaccaggcacggtgtacaactcctttatgcgaagggttttataactttaacaccttatcaggcagttgccttagcgcagaataaattgataacaaatgctgatattggaaatatctgatttgcaaattatcgtgttatcgccaggctttaggaggttaataacatgggcaggataagctcgggaggaatgatgtttaaggcaataacgacagtcgccgcactggtcatcgccaccagtgcaatggcgcaggatgatttaaccattagcagccttgcaaagggcgaaaccaccaaagctgcatttaatcagatggtgcaagggcataagctgcctgcctgggtgatgaaaggcggtacttatacccctgcacaaaccgtaacgttgggagatgagacgtatcaggtgatgagcgcgtgcaaaccgcatgactgtggctcgcaacgtatcgctgtgatgtggtccgagaaatctaatcagatgacggggctgttctcgactattgatgagaaaacgtcgcaagagaaactgacctggttgaatgtgaacgatgcgctttcgattgatggtaaaacggtgctgttcgcggcgttgaccggcagcctggaaaaccatccnnnnnnnnnnnnnnnnaaataattagcggataaagaaacggagcctttcggctccgttattcaattacgcggcttcaactttccgcactttctccggcaactttaccggcttcgtcgccagctcttccggatcaaagtcatcaacgttaatactgcgcagacggctttcttccgctttcaccagaatagcggcttcatctttatcaatcagccccttcgccagcgcgttgtgcgccagttcatccagacgggtaaatggcagatttttaccgagctctttacagatccgctgatgaatcgggtcggcggcaatcacatccaccaacgcctcttccagtaaaccaaccgggttatgctcgcttggcgtcaggtactgaccgcgaccaatacgtgagcgagtggcgttcggcacttgtaaaatcttcgccactttatgatccagcttgtcagacggtgccagataatgacgtccggtcgggaagatcaccacattcagcagcccggcaaccacgcggttcgggaagttttgcagtaaatcgtccatcgcctgttctgcctgatacagcgcatcctgtacgccccagtgcaccagcggcagatcggcttcattacggccttcgtcgtcataacgcttcagaacggcagaggcgaggtaaagctggcttaaaatatcacccagacgtgccgagatacgctcacgacgtttcaggctgccgcccagcactgccatcgagacatcagaaagcagggcgaggttggcgctcaggcggttcaggtgctgatagtagcgtttagtggcatcgccggttggcgtgctgctggttaaaccgcgcgtcaggcccagccagaagctgcgaactttgttgctaccgacgtgaccgatatgtttgaacaacagtttatcgaacacgttgacgtcattgttcttcgccgcttccatctcttccagcacgtacggatggcaacgaatcgctccttgtccgaagatcatcatgctgcgggtcagaatgttagccccttcaacggtgatggcaatcggtgcgccctggtaagcacgcgccaggaagttgctttgcccgagcataatgcctttaccgccggtaatatccatcgcatcaataatcgactgctgcccgcggtgggtacagtgatacttaacgatagccgacagcacggcaggtttttcgccgagcataatgccgtaggtaatcagcgatgccgcagcgtccattacataagcgttcccggcaatacgcgccagcggctcttcaatcccttccatcttaccgatagagattttgaactgacggcgaatgtgagcatacgcgcccgttgccagcgctaccgatttcacgccgccggttgagttggaaggcagggtgatgccgcggcctaccgagaggcactccaccagcatccgccagccttgcccggccattttcggcccgccgataatgtagtcgatcggtacgaagacatctttaccgcgcgtcggtccgttctggaacggcacattcagcgggaagtggcgacgaccaatttccacgcccggcgtggtggtcgggatcagcgcacaggtaatacctaaatcttctgcaccgccgagtaatttctccgggtcggagagtttaaacgccagcccaagtacagtcgcaatcggtgccagcgtaatgtagcgtttgttccaggtcagacgcatccccagcacctgctggccctgccattcgcccatgcagacaatcccggtgtccggaatcgcgcccgcatcggaacccgcttccgggctggtcagtgcaaagcaagggatctcctgaccacgcgccagacgcggcagatagtgatctttctgctcgtcagtgccgtaatgttgcagcagctcgccggggcctaatgagttcggcacgccgacggtaatcgccaggatcccgctgacgccggagagtttttgcagcacacgagactgggcataagctgaaaactccaggccgccgtactcttttttgatgatcatcgcgaagaagcgatgctctttcagatacgcccacaactccggcggcagatccgccagttcatgggtgatctggaaatcattcgccatccggcaggcttcttctaccgggccgtcgagaaacgcttgctcttctgcggtcaggcgcggctgcggatagttatgcagctttttccagtccggcttgccctggaacaagtcgccttcccaccaggtggtacccgcatcaatcgcttctttctcagtgcgcgacatcggcggcatcaccttacggaaaccgcgaaataccggcgcggaaatcatcgacttacgcataggtgcaaagttaaacggcacgaggataatggccagaggcaccagtacccacgccgaccacagaccagcgacgccgagggcagctgtccaggcgagcaaaatcagactgctgataaataagctcacgcggtgatagaacaacgcgccgagcaggacaactgtagcgagaatactcaaaatcatcataacgaaaagccccttacttgtaggaggtctgaccacttgtgatggtatggttgtagtggatgtaaaaacatttagcaatgtgtttacaatataattacaacgaagctcacattgttgctgtttttatctacacttcagggcaaaaagtcctggtcatagcacctgcccgtacttctcgcttttggcggtatccggtacactgcattttgtctattacatttatgctgaaggatatcctcatgtaccaggatcttattcgtaacgaactgaacgaagcggcggaaacgctggctaactttttaaaagatgacgccaatattcacgccattcagcgagcggcggtcctgttagcagacagctttaaagccggtggcaaggtgctttcctgcggcaacggcggctcccattgcgacgccatgcactttgccgaagagctgaccggtcgctaccgtgaaaaccgtccgggctacccggcgattgccatctctgacgtcagccatatttcctgcgtcggtaacgattttggtttcaatgatattttctcccgctatgttgaagcggtaggccgcgaaggcgatgtactgctggggatctccacgtctggtaactctgcaaacgtgatcaaagcgatcgcggcggcgcgtgagaagggaatgaaagtgattaccctgaccggcaaagatggcggcaaaatggctggtacggcggatattgaaattcgcgttccacattttggttatgccgaccgcattcaggaaattcacattaaagtgatccatatcctgatccagttaattgaaaaagagatggttaagtaagtctggcgtaggccgaataatgcgtttacgccgcatccggcctgaaaattcttaagtcaatcttcgccgggggccatgcgctcccgctgttgtgggggttaccgatgtgcgaattgctcgggatgagcgccaacgtccctaccgatatttgctttagtttcaccgggctggtgcagcgtggtggtggaaccgggccacataaagatggctggggcattaccttttacgaaggtaaaggctgtcgcacatttaaagatccacaacccagctttaattcccccattgccaaacttgttcaggactacccgataaaatcctgttcggttgtggctcatattcgccaggcaaatcggggcgaggtggcgttggaaaatactcacccgtttacccgcgagttatggggacgtaactggacttatgcccataacggacaactgacgggctataaatcactggaaaccggcaacttccgcccggtaggtaaaaccgacagcgaaaaagccttttgctggctgctgtataaattaacgcagcgttatccgcgtacgccgggcaatatggcnnnnnnannnnnntatatcgcctcactggcggatgaactgcggcagaagggcgttttcaacatgctgctttcggatgggcgctatgtaatggcgtattgctcgaccaatctgcactggatcacccgccgcgcgccgtttggcgtggcaacgttgctggatcaggatgtggaaatcgacttcagctcgcagaccacaccgaatgatgtggtcacggtgattgcgacacagccgctgacgggcaatgaaacctggcaaaagattatgccaggcgaatggcgcttattttgcctcggggagcgtgtagtttgatgccagttgtggttgcacaacttcgtggcttaacggcttgctgaccacgtaacggccattgaccacagaaacggtcggtggcttacgggtttgctcaaagtagtcgtagcctggcttcagttgctcccagaagtccttaaagttggaatatttatggcgcttcatattggcgtcggtcatgcggaacgggtaaatgctcacttgcacgctcggctgaccaaataccagtgcgccagtaacgaactggaaaatctcgtcaatgccctgattggtcatcgcgtagcagccgatggaaacacaatcgccgtggatcatcaggtatttcccttcataaccatgcgcacggtcataggcattgggganaccaatattaatcgctttgtagtaacggctgtctggttttaactgattacgctggacgctataaaacccttccgggcttttgaaatcgccctgacgctgttttggccctaagccgccggaatatttacagattttatagctgtcgagcagttgatattgctcgcccattttgacgtagagatcgagcgtacgttcttccttgaagatctggatgtagacaggggatcccatcaactgctgcttatactctttgctcactggcgtggtcgagctactgctgcccagcaaaccggcaaacgaaacgcacgggatcaacaacatcgcaagaattaatgcgattttacgcatactgcttattccttgataaaacggttacacacgccaggacggcaaaatggatcccaaatcggaatagtctggattgggaaggctcacattatcaccaaaagagttttacgcaancctgtcggcgcagggtttacaaatttcatcggcagcgggctttacccaaagagcgccgcgtgagttccagttctctcaaatcgtaaaagtttatcggtaagtttgtaaatcaggatccagtccggttcgacatgagcatcgcgataacctttccatgaaccttgcagcgggtggtctttataaacagntgnnnncggtaaagtattattgataagaagcgtcataagatatttcaatttattcatatccttatgacgcttttgtgcaagttttacatcctttgaaaattgtcccgagttcaatatccctttgaatcatatttaaactcctaatttatcaaataaatcatcggcgtctttggccttatgaacatcaacgccagcttcgctgtttttgattgattgaatggttaattgattaggctcgcgtaaatcaaacggcaatgccttttcacgcgcgacctttgtgagggttatgcgaaccaggtcagagatggtcagccccatcccggccagtacgtccgccgcctgattcttcagatcttcatcgattcgggcgcgaacaaatgcgttagcagccattgggatatctcctgtgctgtatatttattcagcttgaattgtagctcaaatgagcaacagcgacaatctatgagtaatttaataaacggatgtttttacataattaactgaaatatatttattannnntanaataatggtttattaagtttgttcaggtacgggccgggatacactgtaacatcaatgcatgaccagccattattgagtatgtccttgccgtcgattccatcctttgtattgtcgggattactgttgatttgtttgccgttttcttcatttgccagcgccaccacatcacatatctctttcagctacgccgcccgccagcggatgcaaaaccgtgcgcgtttattaaaacagtaccaaacccatctgaaaaagcaggtcagctatattgtggaaggcaatgccgaaagcagaagggcgctacgccagcacaaccgcgaacagataaaacagcatccagaatggtttcctgcnccgctcaaggcgagtgacagacgctggcaggcgctggcggaaaacaaccactttttaagcagcgaccatctgcataacattaccgaagtggcgattcaccgcctggagcagcagcttggcaagccttacgtctggggcggcacgcggcctgataaaggctttgactgtagcgggttggttttttatgcctacaacaagatcctcgaggcgaagctcccgcgtacggctaatgagatgtatcactaccatcgggcaacgattgtggcgaataacgacctgcgccggggagatttgctgtttttccatatccacagccgcgagattgccgaccatatgggggtgtatctgggcgacggtcagtttattgagtcaccgcgcaccggggaaaccattcgggtaagtcggttagctgaacctttctggcaggatcactttttaggnncgcgccggattttgacggaagagacgattttgtaggacggataaggcattcacgccgcatccggcagttgtgcgcagatgcctgatncgacgctgacgcgtcttatcatgcctacaaatctgtgcgtttttgcgagccgctttcccgttattccatcacctcattgccgacctttccttttcttcttaccgttgagaaaaaggagtcgccatgtctgaatatcgtcggtattacatcaaagggggaacctggtttttcacggttaacctacgaaatcgtcgaagccaccttctgaccgctcagttccagatgctccgtaacgccattattaacgttaagcgagacagaccttttgaaattaacgcctgggtcgttttgccggagcatatgcattgcatatggacattacccgaaagcgatgatgatttttcctcccgctggcgggagattaaaaagcagttcacccatgcttgtggattgaaaaatatctggcaaccacgtttttaggagcacaccatccgcaataccaaagactatcgccatcatgttgattatatttatataaatccagtaaaacatggctgggtaaagcaagtgagtgattggccattctcaacgttccatcgcgatgtggcgcgagggttatatcccattgattgggcgggagacataacggattttagtgccggggagcgtatcatttcataattgtgcgctggtgccngatgcctgatgcgacgctgncgcgtcttatcatgcctacaaaactgcactcaaccgtaggccggataaggcgttcacgccgcatccggcaattgtgcaccaatgccggatgcgccccttaaaggccaatcaactcaacgcccccattatcttcaactccagctcatccggcacttcgttatacgacagcacatgcagccccggcgctcaggttgtatttaaatatcccgatacagacgccgccgatcaggttaatcgccagaatcatcatcccgnnnntggcatccccgcgcacaaacttcgatgccccgtccatcgcgccgtagaaatcggcctcgctggcaacatctttacgccgggtttgcgcctgtgcctggttgatcaatccggcgttaagatcggcgtcaatcgccagantcatcangccgggcatcgcatccagggtaaagcgggcagaaacctcggaaatacgctcggcccctttggtgacgacgataaagttgattgtcaacagcgtcagtaaatccgagcgtgaaagcattatcgccgcgctgcacgggcagtcgatttttaacggtggtgggctgtcgccgttaaataaaatcagcccgtctcatccgccaaaacctgccaccgtggcggtgccggaagagacggagaaaaaagcgcgtgatgtgaatgagaaaacggcgctgctgaagaagaaatccgccaccgagcttggcgagctggcaaccagtatcaacaccattgcccgtgatgcgcatatggaagcgaatctggagatggagattgtcccgcagggattacgcgtgctgattaaagacgaccagaatcgcaatatgttcgaacgcggcagcgcgcagattatgccgttctttaaaactttgctggtggagctcgcgccagtgttcgactcgctcgataacaaaattattattaccgggcataccgatgcgatggcctacaaaaacaatatctacaacaactggaacctttcgggcgatcgcnnnntctcagctcgtcgggtgctggaagaggccggaatgccggaagataaagtgatgcaggtaagcgcaatggcggaccagatgctgctggacgcgaaaaatccgcaaagcgcgggcaaccgacgcattgagattatggtgctgaccaaaagtgcgtccgatacgctgtatcaatactttggtcagcatggggataaagtggtgcagccgctggtgcaaaagctggataagcagcaggtgctttcgcagcgaacgcgctaaatgctgaatctttacgcatttctcaaaccctgaaatcactgtatactttaccagtgttgagaggtgagtaatgcgtaaaatcattcatgtggatatggactgctttttcgccgcagtggagatgcgcgacaatcccgccctgcgcgatatccctattgctattggcggcagccgcgaacgtcggggggtgatcagcaccgccaattatcccgcgcgtaaatttggcgtacgcagcgctatgccgacagggatggcgctcaaattatgcccacatctcaccttgcttccggggcgctttgacgcctacaaagaagcctcaaatcatatccgtgaaatcttctcgcgctacacctcgcgtattgaaccgttgtcactggatgaagcctacctcgatgtcactgatagcgtccattgccacggttctgcgaccctcatcgcccaggaaatccgccagacaattttcagcgagctgcaactgacggcgtctgcgggcgtggcaccagtaaagtttctcgccaaaatcgcctccgacatgaataaacccaacggccagtttgtgattacgccggcagaagtttcggcatttctgcaaaccttaccgctggcaaaaattcccggtgttggcaaagtctcagcggcaaagctggaagcgatggggctgcggacctgcggtgatgtacaaaagtgtgatctggtgattctgcttaaacgctttggcaaatttggccgcattttgtgggagcgtagtcaggggattgacgagcgcgacgttaacagcgaacggttacgaaaatccgtcggcgtggaacgcacgatggcggaagatattcatcactggtctgaatgtgaagcgattatcgagcggctgtatccggaacttgaacgccgtctggcaaaggtaaaacctgatttactgattgctcgccagggggtgaaattaaagttcgacgattttcagcaaaccacccaggagcacgtctggccgcggctgaataaagctgacttaatcgccaccgcgcgtaaaacctgggatgaacgccgcggcgggcgcggtgtgcgactggtggggctgcatgtgacgttgcttgaccctcaaatggaaagacaactggtgctgggattatgatgtatactattatgtatattctggtgtgcattattatgaggggatcactgtatgcatcgaattctcgctgaaaaatcggtcaatatcactgaattacgtaaaaacccagctaaatactttattgatcaaccggttgcggttctttctaataatcgccccgcaggatatctcttaagtgccagcgcattcgaagcgttaatggacatgcttgctgaacaagaggagaaaaagcccataaaggcgcgcttccgtccaagtgctgcaagattagaggaaattacacgccgagctgaaaaatatcttaatgatatgacggatgatgatttcaatgactttaaggaataaggatgcgggtattcaaaacaaaacttattcgcctgcaacttacagcagaggagcttgatgcgttaacggcggattttatttcctataagcgtgacggtgttttgccagatatatttggtcgcgatgcactctacgacgactcgtttacttggccattaatcaaatttgagcgagttgctcatattcatctggcaaatgtgaataatccatttccgccacagttgcgccaattcagcagaacgaatgacgaatcgcatttggtatattgtcagggtgcgtttgatgagcaagcatggttgctcattgccattctgaaacctgaacctcataaactggctcgagataacaaccaaatgcataaaattgggaaaatggcagaagcgtttcgcatgcgtttttgaatttatattatgaataacatacaaataagaaactatcagcctggcgattttcagcaactatgcgctattttcattagagcggttatgatgaccgccagtcagcattattcaccacaacaaattgccgcctgggcgcagattgacgaatctcgctggaaggagaaactcgcgaaatcacaagtgcgggttgcagtcattaatgcacaaccggttggttttatttcccgcattgaacattatatcgatatgttatttgttgaccctgaatacacccgccgtggggttgccagcgctttgttaaaaccttggattaagtctgaatccgaacttacggtggacgccagcataaccgcaaaacccttttttgaacgttatggttttcagacagttaagcagcagcgcgttgaatgccggggagcgtggtttactaatttttctatgcgatataaaccgcaacattaaatccagcttgcaatgaaaataacgcccgcctggtatgtgcgcgttttcttattccacaaactgcaaggaggtaaatcatgacaaatcctttatcaatgactctttgcagacctttcctggattaattcttttttttcttgccctggattcgtctgccatttcctgatttttatatttatatactctaaataattcgagttgcaggaaggcgacaagcgagtgaatccccaggagcttacataagtaagtgactggggtgaacgaacgcagtcgcagtacatgcaacttgaagtatgacgagtataaatggaatggtacatgggcaaatatattcgtcccttatccgatgcggtatttaccatcgcatctgatgacctgtggatcgagagtttagcgatccaacaattacacaccacggcaaatttacccaacatgcagcgcgtagtggggatgccagatttacaccccggacgcggctacccgattggcgcagcgttcttctctgttggtcgtttttacccgacaagacgtcgcggtaacggtgctggaaacagaaacgggccgctactctgacacgctgcgttcggcgctgatttctctggatggcgacaacgcatgggcgttaagcgaaagttggtgcggcactattcagtggatttgtctgagtccgtatcggcctcatcatgggcgcaaaaactggtttctgggcattgggcgttttaccgctgatgagcaggaacaatcggatgcaatccgttatgagacgctgcgtccgtcggggccgggcggtcaacatgtcaataaaaccgactcggcggtacgcgccacgcatctggcaaccgggattagcgtgaaggttcagtcagaacgcagccagcatgctaacaaacggctggcgcgattgctgattgcctggaagctggagcagcagcaacaggaaaatagcgcagtgctgaaatcgcagcggcgaatgttccatcaccagattgaacgtggcaacccgcgacgaacgttcacagggatggcttttatcgaaggataatgaaggatgaaactgccggaaggcgattaaacgccatccggcagcaaatcaaataattacttcgccggaatttctttcagcagttcagtcagcagtgtccagtaatgacctacgctttcgatgtgaacttgctcatccggagagtgtggaccggtgattgttggcccgatagaaaccatgtccatttccggatacggttttttgaacagaccacattccaggcctgcgtggataatctggatgttcggcgtcttgttgaacaggcgctgataggtttcacgtaccagatgcatcaccggagaattagcgtccggctgccagccaggatatgcgcctttcgcttcggttttcgcgccagccagtttacccagcgaatccagcatgctcaccacgtagtctttaccgctgtcgatcagagaacggatcagacagtgaatttctacgttattgtcagtcatggtcaccacaccgacgttcagggaggtttcgaccacaccttttgccacgtcggagttgcggatcacaccgttcggggtggcgttcagcagacgaataaaggtatcgcgagatttcgcaatcagggcagctttatcgttcgctacagagtccagcaacaaggccagatttttctctttctctgccagctcgtttttcaggatctcctgataggtattcaccagagatttcagggcgtcgactttatcagctgcgacagcaatggtcgcaaaggcttcacgcgggatggcgttacgcagtgtgccgccgttgaaatcaataagacgcaggtccagttcttctgcatgacccgccaggaagcgcaccagcagtttgttggcattacccaggccaacgtggatttccccgccggagtgaccgcctttcagaccttttaaggttaacttgaaggtttcaaaaccagctggaaccgcttcacgatctaaatgcaggttggaggtgaagtcgataccccccgcgcaacccatgtagatttcaccttcttcttcggagtcggtgttaatcagaatatcagcctgcaaccagttgctctgtaagccgaacgcaccgtccataccggcttcttcggtcatggtcagcagcacttccaacgggccgtgaaccacgttttcgtcagccagaaccgccagtgcagaggccataccaatgccgttatccgcacccagcgtggtgccgcgcgctttaacccattcgccatcaatatatggctggataggatctttcgtgaagtcatgcacggtgtcgttatttttctgcggcaccatatcgaggtgggcctgcaagacgaccggtttacgattttccatacctgcggtagcaggtttacgaatcaggatattacctacctgatcgcgttcgacatggaaacctttctcttttgcccaaccaacaatgtattcagcgagttgctcttcatgataggacgggtgaggaatagaacagattttggcaaaaatatcccacagcggntgtggagataattgagacagttcagacacgttaagtctccttgtcgatcacccgcaaaacagtattgcaggtcacagggttagcagaaaatgttgtcaacacaagacaggcttgcgagatatgtttgagaataccactttatcccgcgtcagggagaggcagtgcgtaaaaagacgcggactcatgtgaaatactggtttttagtgcgccagatctctataatctcgcgcaacctattttcccctcgaacactttttaagccgtagataaacaggctgggacacttcacatgagcgaaaaatacatcgtcacctgggacatgttgcagatccatgcacgtaaactcgcaagccgactgatgccttctgaacaatggaaaggcattattgccgtaagccgtggcggtctggtaccgggtgcgttactggcgcgtgaactgggtattcgtcatgtcgataccgtttgtatttccagctacgatcacgacaaccagcgcgagcttaaagtgctgaaacgcgcagaaggcgatggcgaaggcttcatcgttattgatgacctggtggataccggtggtactgcggttgcgattcgtgaaatgtatccaaaagcgcactttgtcaccatctttgcaaaaccggctggtcgtccgctggttgatgattatgttgttgatatcccgcaagatacctggatcgaacagccgtgggatatgggcgtcgtattcgtcccgccaatctccggtcgctaatcttttcaacgcctggcactgccgggcgttgttctttttaacttcaggcgagttacaatagtttccagtaagtattctggaggctgcatccatgacacaggcaaacctgagcgaaaccctgttcaaaccccgctttaaacatcctgaaacctcgacgctagtccgccgctttaatcacggcgcacaaccgcctgtgcagtcggcccttgatggtaaaaccatccctcactggtatcgcatgattaaccgtctgatgtggatctggcgcggcattgacccacgcgaaatcctcgacgtccaggcacgtattgtgatgagcgatgccgaacgtaccgacgatgatttatacgatacggtgattggctaccgtggcggcaactggatttatgagtgggccacccaggcgatggtgtggcaacaaaaagcctgtgcggaagaagatccgcaactcagtggtcgtcactggctgcatgcggctacgttgtacaacattgccgcctatcctcatctgaaaggagatgacctggccgagcaagcgcaggctttgtcaaaccgcgcctatgaagaggccgctcagcgtctaccgggcacgatgcggcagatggagtttaccgtacccggcggtgcgcccatcaccggctttttgcatatgccgaaaggcgatggcccgttcccgacggtattaatgtgtggtggtctggatgcgatgcagacggactattacagcctgtatgaacgttattttgcgccgcgcggcattgcgatgctgactattgatatgccgtcggtgggcttttcttcaaaatggaagctcacccaggactccagcctgttgcatcagcgcgtcttaaaggctctgcctaacgtaccgtgggtggatcacactcgcgtcgcggcctttggtttccgtttcggcgctaacgttgccgtgcgtctggcatatcttgaatcgccgcgtctgaaagcggttgcctgtcttggtccggtagttcataccctgttgagtgattttaagtgccagcaacaggtgccggaaatgtatcttgacgttctggcgagtcgtttggggatgcatgatgcttccgacgaagcgttgcgcgtggagctgaatcgctattcattaaaagtgcaaggattgctgggacgtcgatgcccaacgccaatgttatcaggctactggaagaacgatccgttcagcccggaagaggactcacgcttaatcacctcatcatctgctgacggtaaattattagagatcccatttaacccggtgtatcggaattttgacaaaggtnttcaggaaatcaccgactggatcgaaaaacgcttgtgttaaaaatttgctannttttgccaatttggtaaaacagttgcatcacaacaggagatagcaatgacgttaccgagtggacacccgaagagcagattgatcaaaaaatttaccgtactaggcccgtatattcgtgaaggtaagtgcgaagataatcgattctttttcgattgtctggctgtatgcgtcaacgtgaaaccggcaccggaagtgcgtgagttctggggctggtggatggagcttgaagcgcaggaatcccgttttacctacagttaccagtttggtctgttcgataaagcaggcgactggaagagtgttccggtaaaagatactgaagtggttgaacgactggagcacaccctgcgtgagtttcacgagaagctgcgtgaactgctgacgacgctgaatctgaagttggaaccggcggatgattttcgtgacgagccggtgaagttaacggcgtgagtgaaatgtgccggatgcatcacatccggcaataatcattaaaactgataggtcatgccaaccgcgacaatatcatcattattaatattcaatttgttatcgctatccagttggttgattttataatcaacaaacgctgacatatttttgttgaaataatatgtagccccgacatcgatataattgaccagatcttcatcaccgataccttcaatatctttccctttcgataagacataacccagcgatggacgcagaccaaagtcaaactggtattgagcgaccgcttcaaagttctgtgtcttattggcaaagccgccagttattggcgtcattttgcgtgtttcagaataaaaagttgccagataaatattattggcatcgtatttcagacctgtagcccaagcttctgcacgcttgcctgtgccacggctttgcaggttctgctcgttggtgcgatctgagttggtataggccccnctaatggcgaaatcgctgccgccaaagtcatatgtcaatgacgtgccgaagccatcgccgttttgctttttaacgtcgcggttttcgtttttcccttgatattgcagggttaagttcaggccatcgataacgccgaagaagtcggtgttccgatacgtcgtcagaccgctggcgcgtttggtcataaagttgtcggtctgcgccgaggagtcgccaccaaattccgggaacatatcggtccaggcttccacgtcatacaacgcgcccaggttacggccatagtcgaaagaacccaaatctttatacttcaatccggcaaaagcgagacgcgttttttgctgtgcagtatcactctccgctttatttccggcaaactccgcttcccaacgaccataaccagtcagttgatcgttaatttgtgtttcgcctttaaaaccaaaacggatataactctggtcgccatctttactgtcgttatcactcatataatgcatggctttaactttgccatagacatccagtttattaccgtctttgttatatatttctgcggcctgtacggatgcagatgccacaatgcccatcaccactaatgccagagtgctctttttcattttcattcctgattttaatnnnnnnnnnnanattctgcgggagagccccgttgaaaacaggaaagtttttaacctgagattgttaaagatatattacagattaatgatattcttaaaatgtggtaatttattaaatctgtaataaaagcgtaaacaactgccgctaggcttgctgatcccgcgcaacaaaacgccatgctttgctcgcagatggttggcaaccgacgacagtcctgctaaaacgttcgtttgatatcatttttcctaaaattgaatggcagagaatcatgagtgacagccagacgctggtggtaaaactcggcaccagtgtgctaacaggcggatcgcgccgcctgaaccgtgcccatatcgttgaacttgttcgccagtgcgcgcagttacatgccgccgggcatcggattgttattgtgacgtcgggcgcgatcgccgccggacgtgagcacctgggttacccggaactgccagcgactatcgcctcgaaacaactgctggcggcggtagggcagagtcgactgattcaactgtgggaacagctgttttcgatttatggcattcacgtcgggcaaatgctgctgactcgtgctgatatggaagaccgtgaacgcttcctgaacgcccgcgacaccctgcgtgcgttgctcgataacaatatcgttccggtaatcaatgagaacgatgctgtcgctacggcagagattannnncggcgataacgacaacctttctgcactggcggcgattctggcgggtgccgataaactgttgttactgaccgatcaaaaaggtttgtataccgctgacccgcgcagcaatccgcaggcagaactgattaaagatgtttacggcattgatgacgcactgcgngcgattgctggtgacagcgtttcaggcctcggaactggcggcatgagtaccaaattgcaggccgctgacgtggcttgccgtgcgggtatcgacaccattattgccgcgggcagcaagccgggcgttattggtgatgtgatggaaggcatttccgtcggtacgctgttccatgcccaggcgactccgcttgaaaaccgtaaacgctggattttcggtnnnncgcctgcgggtgaaatcacggtagatgaaggggcaaccgccgccattcttgaacgcggcagctccctgttgccgaaaggnnnnaaaagcgtgactggcaacttctcgcgtggtgaagtcatccgcatttgtaacctcgaaggtcgcgatatcgcccacggcgtcagtcgttacaacagcgatgcattacgccgtattgccggacaccactcgcaagaaattgatgcaatactgggatatgaatacggcccggttgccgttcaccgtgatgacatgatcacccgttaaggagcaggctgatgctggaacaaatgggcattgccgcgaagcaagcctcgtataaattagcgcaactctccagccgcgaaaaaaatcgcgtgctggaaaaaatcgccgatgaactggaagcacaaagcgaaatcatcctcaacgctaacgcccaggatgttgctgacgcgcgagccaatggccttagcgaagcgatgcttgaccgtctggcactgacgcccgcacggctgaaaggcattgccgacgatgtacgtcaggtgtgcaacctcgccgatccagtggggcaggtaatcgatggcggcgtactggacagcggcctgcgtcttgagcgtcgtcgcgtaccgctgggggttattggcgtgatttatgaagcgcgcccgaacgtgacggttgatgtcgcttcgctgtgcctgaaaaccggtaacgcggtgatcctgcgtggtggcaaagaaacctgtcgcactaacgcggcaacggtggtggtgattcaggacgccctgaaatcctgtggcttaccggcgggtgccgtgcaggcgattgataatcctgaccgtgcgctggtcagtgaaatgctgcgtatggataaatacatcgacatgctgatcccgcgcggcggggctggtttgcataaactgtgccgcgagcagtcgacgatcccggtgatcacaggtggtataggcgtatgccatatttatgttgatgaaagtgcagagattgctgaagccctgaaagtaatcgtcaatgcgaaaactcagcgtccgagcacatgtaatacggtagaaacgttgctggtgaataaaaacatcgcctatagcttcctgcccgcattaagcaaacaaatggcggaaagcggcgtgacgttacacgcagatgcatctgcgctggcgcagttgcagacaggccctgcgaaggtggtggcggttaaagccgaagagtatgacgatgagtttctgtcattagatttgaacgtcaaaatcgtcagcgatcttgacgatgccatcgcccatattcgtgaacacggcacgcaacactccgatgcgatcctgacccgcgatatgcgcaacgcccagcgttttattaacgaagtggattcgtccgctgtttacgttaacgcctctacgcgttttaccgacggcggccagtttggactgggtgcggaagtggcggtaagcacacaaaaactccacgcncgtggcccaatggggctggaagcactgaccacttacaagtggatcggcattggtgattacaccattcgtgcgtaaataaaaccgggtgatgcaaaagtagccgtttgattcacaaggccattgacgcatcgcccggttagttttaaccttgtccaccgtgattcacgttcgtgaacatgtcctttcagggccgatatagctcagttggtagagcagcgcattcgtaatgcgaaggtcgtaggttcgactcctattatcgncaccacttaaatcaataagttacctcgcatttaagtaaaccacgttctcctcttgtgccgtatttgtgccattgcgacttataatcgcatcgattttgctcgcgtgctcggtgagatgcccggctgaaaggtgggcgtatctttgaaccatttcgagagtttcccatcctcccatctctttaagtgcaagaagagagacaccggactgaaccagccagcttgcccaggtatgcctcaggtcatggaagcggaagttgctaatgcctgcccgctttaacgctcctttccatgccttgttgctgtcggttctcatcttccttaccgctgctgtttttgttccgtcgcttcggtaggcaggtttggtgtggacaaatacccatctcttatggagcccctgctgttttcttaatatctggcatgcggtttcgttaagaggaactccgatcgcattgccagcttttgtttcatcagggtgcatccatgccattttcttatccagatcgacctgtgaccactcaaggtctgtaacgttggagcggcgaagacctgtagtgattgcgaacatgaccacagggaagaaatgaggagcaatttctgcaaacaggcgcttcgattcctcctctgtaagccatctgattcgtccattcttaacgcgtggtgttgatatttttggcgccctgtcaagccatccacattcaacagccatattgagaatagcgcgaagtattgccagatgccgcgtcttcgttcctttgcttgccagctttggtttatactccggcactggcttgccaagccgcaaacacctgtcccggctcatctcccagttcaggcgatggcggcggttttccatcccgtctaccgcctccattattttttctgttgttatgtcagagagaatggtttctctgaagtgcaacatccagaacgatataatgctcttgtcatcatcaatggacttcttatccgatttctcacgcagccaccgtatgcaggcttccttgaatagctttttcggcgattccccgagattttttactctccacgcctctgctttcagacgatcgtgaagttcttgcgcttgccttttgtccgatgtttcaagagagcgtctaactcttgatccatcttgcgcgacgaaatcgcagtgccatgtgccaccgcgcagtttgattgacatgctttaacctcctgcacatcaaccgcattcaccgcgctattgtgtctcacagacttaagcgccgcaatgcagtctgacttgcaaatgcgatatgggcttttaggtttatctggatttatctttgcggcctgaagtcgtccacttcgtatccactgcgtgatagtgcctttgtctaccttcagatacgacgcagcctcttcacgagtgaagatttcttcttccacttggagtctccatttattggattgacatgattgctgtaggtctggatatcttgagaagctggcaggcctcatcgagtgtgaggctgtggttagtccttgcgtaactcgctaattcttctgtaagtctctggtgctttgtttccgtgtatcttcatttcagacttcaacagagcaacgagagaatcccattcgttgaggattcctttgaatgccggaacgcgctttgcaaccttgtcgaatgaatctctgatttctggaatctgctcaacaagtgcaacgcatcgtctgaaatcggctgcgtcatgtggagcaccgaagctatgaccatagatattctttttcaggccacatgcgattgaggcaagagttgcgctactgatgccgacatcgccagtcgattgccatttcaaaaccttcatagccaaatctgacatttcttgtctccataaaacaaaacccgccgtagcgagttcagataaaagaaatccccgcgagtgcgaggattgttattcacctttgacggcaagttgcaggttagccacggttaactccttgctgtgtggcgtcgagtaataaatcccacaaccgctgagagcaatttccgcatgtacagcgttgacccacaacgtttatcgcgttgctgatttccggcgttacctgtttaggaaccataacccaaccatccggagttaccggaagcgagaacggcagcacatctctgtgaacaagtttttgctgtgacaggttatccagaactttctgtactgctgcatcaccgaatacaccaagcgcatctgccataactcctacaacctgataagcctcagcgcataccgtggataaaccatccggagttaccggagagttgccgggttctttaatgtgcaagcgaggctcaccatcttttggctcaggccactggcgctccatgttgatcttcaatttatcttccatagcagcggtaatttcagcatcgctgatgccggcacggcgctgtgcatcccacaacagaaactgcatatcagcccactcgctaagatcgtctggttcggctgcggcttccagagcctcttttgagaggtgtttcagtggaccaatggggccaacgcagccaaatgtggagtcagaccatttggcatgctcgtggcgaatctgttcgcgttccagtgaggcgagagcgattttaaatgctgtaagcatgtgtgcttgatcgttgtcgagtccgaatggcatttcatctcgtgctgactcaatactggtaatcgtattttgtagccattctttggtaaaagtgctcatcgtaaaatatcctctatactggtaagtccttcattatttagccagatcatggcgtcatccggcaacttgctgtctggtttggcgtttttgagagaggaactcagtcgcttaatccacattgtcacctcagtaatgcgcctgtctttgccttccagctcaacacgcagcttccctaccgttagcgcaatttcctcgctctcttggtcgcgtgatttgatgtattgctggtttctttcccgttcatccagcagtgccaagacggtagcaggattggctgcggcgatgaattcagcattggcctgctgttccatttggaaatcttcatcgaaaccgctttctggatgcgctccttcaattctgcaaataggaatatatccagcaacttcacgatgaattagcgcatcatcaccatcaaatcggctctctccatattcgagcgaccgctcaccacacgttgctttttctgccgcctcacgcagtgcctgagagttaatttcgctcacttcgaacctctctgtttactgataagctccagatccttctggcaacttgcacaagtccgacaaccctgaacggccagacgtcttagttcatctatcggatcgccacactcacaacaatgagtggcagatatagcctggtggttcaggcggtgcatttttattgctgtgttgcgctgtaattcttcaatttctgatgctgaatcaatgatgtctgccatcttccattaatccctgaattgttggttaatacgcttgagagtgaatgcgaataataaaaaaggagcctgtagctccctgatgattttgcttttcatgttcaccgttccttaaagacgccgtttaacataccgattgccagacttaagtgagtcggtgtgaatcccatcagcgttaccgtttcgcggtgcttcttcagtacgctacggcaaatgtcatcgacgtttttatccggaaactgctgtctggcttttttgatttcagaattagcctgacgggcaatactgcgaagggcgttttcttgctgaggtgtcattgaacaagtcccatgtcggcaagcataagcacacagaatatgaagcccgctgccagaaaaatgcattcagtggttgtcataccaggtctctctcatctgcttctgctttcgccaccatcatttccagcttttgcgaaagggatgtggctaacgtatgaaattcttcgtctgtttctactggtattggcacaaacctgactccaatttgagcaaggctatgtgccatctcaatactcgttcttaactcaacaggagatgctttgtgcatatcgcctcccgtttattatttatctcctcagccagccgctgggctttcagcggatttcggataacagaaaggccgggaaatacccagcctcgcttcgtaacggagtagacgaaagtgatcgtgcctacgcggatattatcgtgaggatgcttcatcgccattgctccccaaatacaaaaccaatttcagccagtgcctcgtccattttttcgatgaactccggcaccatctcgtcaaaacccgccatgtacttttcatcccgctcaaccacgacataatgcaggccttcacgcttcatacgcgggtcatagttggcaaagtaccaggcatcttttcgcgtcacccacatgctgtactgcacctgggccatgtaagccgactttatggcctcgaaaccaccgagcctgaacttcatgaaatcccgggaggtaaacgggcatttcagctcaaggccgttgccgtcactgcataaaccatcgggagagcaggcggtgcgcatactttcgtcgcgatagatgatcggggattcagtaacattcacgccggaagtgaattcaaacagggttctggcgtcgttctcgtactgttttccccaggccagcgccttagcattaacttccggagccacaccggtgcaaacctcagccagcagggtgtggaagtaggacattttcatgtcaggccacttctttcctgagcggggctttgctatcacgttgtgaacttctgaagcggtgatgacgccgagccgtaatttgtgccatgcatcatccccctgttcgacagctctcacgtcgatcccggtacgctgcaggataatgtccggtgtcatgctgccaccttctgctcagtggctttctgtttcaggaatccaagagctttcactgcttcggcctgtgtcagttctgacgatgcgcgaatgtcgcggcgaaatatctgggaacagagcggcaataagtcgtcatcccatgttttatccagggcgattagcagagtgttaatctcctgcatggtttcatcgttaaccggagtgatgtcgcgttccggctggcgttctgcagtgtatgcagtattttcgacaatgcgctcggcttcatccttgtcatagataccagcaaatccgaaggccagacgggcacactgaatcatagctttatgccgtaacatccgtttaggatgcgactgccacggccccgtgatttctctgccttcgcgggttttgaatggttcgcggcggcattcatccatccattcggtaacgcagatcggatgattacggtccttgcggtaaatccggcatgtacaggattcattgtcctgctcaaagtccatgccatcaaactgctggttttcattgatgatgcgggaccagccatcaacgcccaccaccggaacgatgccgttctgcttatcagggaaggcgtaaatttctttcgtccacggattaaggccgtactggttggcgacgatcaacaatgtgatgaactgcgcatcgctggcatcgcctttaaatgccgtctggcgaagagtggtgatcagttcctgtgggtcgacagaatccatgccgacacgttcagccagcttccctgccagcgttgcgagtgctgtactcatccgttttatacctctgaatcaatatcaacctgatggtgagcaatggtttcaaccatgtaccggatgtgttctgccatgcgctcctgaaactcaacatcgtcatcaaacgcacgggtaatggcttttttgctggccccgtggcgttgcaaatgaccgatgcatagcgattcaaacaggtgctggggcaggcctttttccatgtcgtctgccagttctgcctctttctcttcacgggctatctgctggtagtgacgcgcccagctctgagcctcaagacgatcctgaatgtaataagcgttcatggccgaactcctgaaatagctgtgaaaatatcgcccgcgaaatgccgggctgattaggaaaacaggaaaggggttagtgaatgcttttgcttgatctcagtttcagtattaatatccattttnnannngcnnnnacggcttcacgaaacatcttttcatnnnnnnnnnnngnngcgatagtgaatttagtctggatagccataagtgtttgatccattctttgggactcctggctgattaagtatgtcgataaggcgtttccatccgtcacgtaatttacgggtgannnnnnnnnnnnnnnnnnnnnnngggnngccagcaacaggccaccctgcaatggcatattgcatggtgtgctcnnnnnnnnnacataacgaaaaacgcctcgagtgaatcgttattggtatgcatnnnnnnnnnncctcacattggagggcaaagaagatttccaataatcagaacaagtcgnntcctgtttagttacgagcgacattgctccgtgtattcactcgttggaatgaatacacagtgcagtgtttattctgttgnnnnnnnnnnnnnnnnnnnnnnnnnnnnggcagccttgtttttctgtttgccnnnnnnnnnnnnnnncattgccgtagttcgtattgcccatttatcgacatatttcccatnnnnnnnnnnngnnaacnnttcttcaggcttaaccatgcattccgattgcagcttgcatccattgcatcgcttgaattgtnnnnnnnnnnnnnnnnnnnnnntagtcgtagtcatacggatagtcctggtattgttnnnnnnnnnnnnnnnnannctcttcgaactcttcaaattcttcttccatatatcaccttaaatagnnnnnnnnnnnnnnnnnnnnnnnnnnnnnnnnnnnnnnnnnnnnnnnnnnnnnnnnnnnnnnnnnnnnnnnnnnnnnnnnnnnnnnnnnnnnnnnnnnnnnnnnnnnnnnnnnnnnnnnnnnnnnnnnnnnnnnnnnnnnnnnnnnnnnnnnnnnnnnnnnnnnnnnnnnnnnnnnaaccatgtatatgatcgttatctgggtnnnnnnnnnnnnnnnnnnnnnnnnnnnnnnnnnnnnnnnnnnnnnnnnnnnnnnnnnnnnnnnnnnnnnnnnnnnnnnnnnnnnnnnnnnnnnnnnattttcgctagcaannannnnncnnnnnnnnnnnnnnnnnnnnnnnnnnnnnnnnnnncnntttaagctaagaaaacgcattaagnnnnannacgataaagtgcgatcagtaantcaaaaccnnacagaagagcnnnnnatggttttgtnnnnagccctnnatgaaggcaggaagtatgtggttannnnnnnnnnnnnnnnnnnnnnnnnnnnnnnnnnnnnnnnnnnnnnnnnnnnnnnnnnnnnnnnnnnnnnnnnnnnnnnnnnnnnnnnnnnnnnnnnnnnnnnnnnnnnnnnnnnnnnnnnnnnnnnnnnnnnnnnnnnnnnnnnnnnnnnnnnnnngccaaggccaatatctaagtaactaggtaagagganncgannttnnnnnnnnnnnnnnnnnnnnactgcatgttatgccgcgttcgccaggcttgnngtaccnnnnnnnnnnnnnnnnnnnnncantacgttgcaggttgctttcaatctgtttgtggtattcnnnnannactgtnnggtctatcggatttagtgcgctttctactcgtgatttcggtttgcgattcagcgagagaatagggcggttaactggnnnnnnnnnnaccccaaccaacaggggatttgctgctttccattgnnnnnnnnnnnnnnnnnnnnnnnnnnnnnnncgtgtttgtnnnnccatctggattctcctgtcagttagctttggtggtgtgtggcagttgtagtcctgaacgaaaaccccccgcgattggcacattggcagctaatccggaatcgcacttccggccaatgcttcgtttcgtatcacacaccccaaagccttctgctttgaatgctgcccttcttcagggcttaatttttaagagcatcaccttcatggtggtcagtgcgtcctgctgatggtttaaaattacaagaaagattgtatgctgtaaacaagaaatattgtaaaaagaggtatacaaaacaaactccattgtttttaaacggaannnagtttgttttttggttattgagattgaggtggggattactggttgcaggttccgactacatcaccaacaaaggatttggttgatgtaagttgttgcatgcctgggatattcattactttggagtaaagagcttttttgtctgtagtgattgaccaagtttcaacagttattcctcctcctgactggtattcccctaccatagtgttcgatgacaaagcagtgtatttcatctctggatagacgccagagactgattcataaaccgatgatttatcgccattaattgttacgtggaaaacggaatcttccgtgctgtcttttgtaaatccgtaacgatcgccattcattgccccgtacccgtgcaggtttgtgacaatccagcattcagaattggcgctggtagttaagagtattgtgagtagcgctgcaatcctgatcatacgaattttaccctcgcttctacgacaacaccgataatcttgcagttcccgttgatgggagtcataggccatgaagganncaggcctttcaggtacttctgaccgccatcaatnnnnnnnnttttgaatgttgcttcgttcgcgtcagtcagtttggctacaacaaggcttccattcacnngnnnacgtccagtatctactaacaccatatgaccttcagggatgctttgacctacaggtgaggtcatggaatcaccttcaaccttcagccaaaatccatcgcctaataagttcacgtcactgtcataccattcatcaatnnnnnnnnnnncgtagggctcacaagcttcacaccacnnnnnagctctaaccatgctaatcaatggatnnnnnnnnnnnnnnnnnnnnnnnnnnnnnnnnnnnnnnnncgaatcagaggtgccattgagcagccagtcnncacttnnnnnnnnnnnngacgcaagttctggtaaaaagcgnnnnnnnnnnnnnnnnnnnnnnnnnnnnnnnnnnnnnnnnnnnnnnnnnnnnnnnaccttttgagnnnnttnngccnnnnnnnnnnnnnnnnnnnnnnnnnnnnnnnnnnnnnnnnnnnnnnnnnnnnnnnnnnnnnnnnnnnnnnnnnnnnnnntcttnnnaagaaaaactgtattnnanaaanaanntacattgtatnnnnnnnnnnnnnnnnnnnnnnnnnnnngcgatatgcaaactctttctgaacgcctcaagnnnnnnnnnnnnnnnnnnnnaatgacgcaaaccnnannggcaannnnnnnnnnnnnnnnnnnnnnnnnnnnnnnnnnnnnnnnnnnnnnnnnnnnnnnnnnnnnnnnnnnnnnnnnnnnnnnnnnnnnnnnnnnnnnnnnnnnnnnnnnnnnnnnnnnnnnnnnnnnnnnnnnnnnnnnnnnnnnnnnnnnnnnnnnnnnnnnnnnnnnnnnnnnnnnnnnnnnnnnnnnnnnnnnnnnnnnnnnnnnnnnnnnnnnnnnnnnnnnnnnnnnnnnnnnnnnnnnnnnnnnnnnnnnnnnnnnnnnnnnnnnnnnnnnnnnnnnnnnnnnnnnnnnnnnnnnnnnnnnnnnnnnnnnnnnnnnnnnnnnnnnnnnnnnnnnnnnnnnnnnnnnnnnnnnnnnnnnnnnnnnnnnnnnnnnnnnnnnnnnnnnnnnnnnnnnnnnnnnnnnnnnnnnnnnnnnnnnnnnnnnnnnnnnnnnnnnnnnnnnnnnnnnnnnnnnnnnnnnnnnnnnnnnnnnnnnnnnnnnnnnnnnnnnnnnnnnnnnnnnnnnnnnnnnnnnnnnnnnnnnnnnnnnnnnnnnnnnnnnnnnnnnnnnnnnnnnnnnnnnnnnnnnnnnnnnnnnnnnnnnnnnnnnnnnnnnnnnnnnnnnnnnnnnnnnnnnnnnnnnnnnnnnnnnnnnnnnnnnnnnnnnnnnnnnnnnnnnnnnnnnnnnnnnnnnnnnnnnnnnnnnnnnnnnnnnnnnnnnnnnnnnnnnnnnnnnnnnnnnnnnnnnnnnnnnnnnnnnnnnnnnnnnnnnnnnnnnnnnnnnnnnnnnnnnnnnnnnnnnnnnnnnnnnnnnnnnnnnnnnnnnnnnnnnnnnnnnnnnnnnnnnnnnnnnnnnnnnnnnnnnnnnnnnnnnnnnnnnnnnnnnnnnnnnnnnnnnnnnnnnnnnnnnnnnnnnnnnnnnnnnnnnnnnnnnnnnnnnnnnnnnnnnnnnnnnnnnnnnnnnnnnnnnnnnnnnnnnnnnnnnnnnnnnnnnnnnnnnnnnnnnnnnnnnnnnnnnnnnnnnnnnnnnnnnnnnnnnnnnnnnnnnnnnnnnnnnnnnnnnnnnnnnnnnnnnnnnnnnnnnnnnnnnnnnnnnnnnnnnnnnnnnnnnnnnnnnnnnnnnnnnnnnnnnnnnnnnnnnnnnnnnnnnnnnnnnnnnnnnnnnnnnnnnnnnnnnnnnnnnnnnnntggggnacagcagaagacctgaccgccgcagagtggatgtttgacatggtgaagactatcnnnnnnnnnnnnnnnnnnnnnnnnnnnnnnnnnnnnnnnngccagaaaaccgaattttgctgggtgggctaacgatatccgcctgatgcgnnnnnnnnnnnnnnnnnnnnnnnnnnnnnnnnnnnnnnnnnnnnnnnnnnnnnnnnnnnnnnnnnnnnnnnnnncaggacaacttctggtccggtaacgtgcttagnccnnnnnnnnnnnnnnnnnnnnnnnnnnnnnnnnnnnnnnnngcgacaagtggacccagctcgaaatcaaccgtaacaagcannnnnnnnnnnnnnnnnnnnnnnnnnnnnnnnnnnnnnnnnnnnnnnnnnnnnnnnnnnnnnnnnnnnnnnnnnnnnnnnnnnnnnnnnnnnnnnnnnnnnnnnnnnnnnnnnnnnnnnnnnnnnnnnnnnnnnnnnnnnnnnnnnnnnnnnnnnnnnnnnnnnnnnnnnnnnnnnnnnnnnnnnnnnnnnnnnnnnnnnnnnnnnnnnnnnnnnnnnnnnnnnnnnnnnnnnnnnnnnnnnnnnnnnnnnnnnnnnnnnnnnnnnnnnnnnnnnnnnnnnnnnnnnnnnnnnnnnnnnnnnnnnnnnnnnnnnnnnnnnnnnnnnnnnnnnnnnnnnnnnnnnnnnnnnnnnnnnnnnnnnnnnnnnnnnnnnnnnnnnnnnnnnnnnnnnnnnnnnnnnnnnnnnnnnnnnnnnnnngaaggtcgtaggttcgactcctattatcggcaccatctcaacttcctcaaacgtccgtattagtccataaaatctctganntataacnnnnnnnnnncttttaagtccatagtagtccgtaaccatccagtagaatccggtactgaatgtgtataggattgtgtatatgttcctgttcggtctggattcctatacacatgcctttaaacgatatgcagattcgccgcgctaagcctgaagctaaagcctatacacttggagatgggctagggttgtcattacttatagaacctaatggaagcaagagttggcggttccgctatcgctatgccggcaaacccaaaatgatctcgcttggtgtttacccaacgatcacccttgccgatgctcgttcccgtcgtgatgaagctcgaaaacttgtggcagaaggaaagaaccctagtgaggttcgaaaagagcaaaagctagctatgcaaacagagtcagagaacgccttcgaaaagatagccagagagtggcatcaacttaaatctgctaaatggtcggcgggatatgcatcagacatcatggaagcgtttaagaacgacatttttccttatgtcggaacaaggcctgtgggagagattaaaccgctagagctgctgaacgttctgcgtaaaattgagaaacgtggtgcgttggagaaaatgcgcaaagtgcggcagcgttgctccgaagtgtttcgctacgcaattgcaacgggtagggcggagtacaatcctgcggctgatctctccagcgctctcgaagtacaccaatccaatcatttcccattcctaaaagctgatgagatacctgattttctacgtgccttagagggttactccgggagtaagcttgtccagatagccacgaaattactgatgattacgggtgtgagaaccatcgaattacgcgcggcattatggcaagaatttgatctggataacgctatttgnnnnnnnccnnntgaaaggatgaaaatgcgtaggccacatcttgtgcccttatcatctcaagcggtagatttactcaatgaactcaagatcatgacagggaactatcgttatgtttttccagggcggaacgatccgaataggccaatgagcgaagcgagtataaatcaagccattaagcgtattgggtatggaggaaaagtcactggacatggttttcgtcataccctttctacaatcctgcatgagcaaggttttgagagtgcttggattgaaatccagttggctcatgtagataaaaattctattagggggacttataaccatgctcaatattttagtggaaggaagtctatgatggactggtacagtaatttgatatttgaaagactaaaaaggagttaatttgtgtctcaaccactttcggaaatattgacatgggatgataaacaatgggaggtatttgtccatgattggcttattgtctgtaaatcagatgattacccgtggagcgaacgtttgggaggagctggagataaaggtagagacgttgttggatataaatcggatcctaacgtagaaggttattcttgggataattatcaatgcaaactgtacaannnnagtttagggttctctgatgttgtagttgagtnnnnaaannttatctattttactctgaatggtgattatcccatccctcagaagtacttttttgtggcaccctatgatttatctactacattttctaatttattgaaaaataaaaacgagcttaaaaaagcagtccttgattcatgggattcagcaatttcaaaaaaataactaaaaagattgatattccattagatgatgaaataaaaaaatatattgaggattttgattttagtatttttnncnnnntacccttatcattgattttaaatgatattgcaaatacacacctttattttaagtactttaacgagctgtatgtcgtgagaatccctccaaatgaaattccaacatacaattcaaaaaaagagtctgtatatgttaatgcactgcttcaagcctattcagagcatggaaataaaacttatagttctttcttagagcttgatgatccatacagacgacactttaataatagtagaaatgatttttattttgcatcttcgcttgaggtttttgtccgcgaagtatttaaagatgatgtattcaaagcattgaaatgttacatttcatcttcaattgaacccgtcttttatgaagaccataattatgcatttattaggtgtaatgcagtcttgaagcaggctgttctgacaccaattgcacattcagtactatcaaaaatatgtgaagcaaatgataaaaaaggaatatgccatcatttggttaatgatggtgaagtaatttggacggtgagataatggttagaatttataattcaagtttagaagtggcatgtcgaatagcgaaagtgctcgtcgctatttatccttcttcattaagccttgaacggcttatttgttttgattttattttagtaaannnnnnnnnnnttttacctgaagagattagtcttcatcctccaataccccgtagagatgctcagttagccctaaaacgagagattgttttagaatcattggctttgttgcaaggctatgaactagcctcaaaaatttatacacatcgtggttttgtatataaagcttctgaaaaaacatatgcatttacaaattctctacataatgaatatgttgcgcagatggagcataatataaatttggtggttaagttatatagtgatattcctgatgagcagttgcaatcaattataaaaaataaaattggcaaatatgatatggaatttaattatgaatgacaatttttttacgttcagaaaaataaaggtaaccggattcaataaattagatactataattgaatttggttctaaattgactattttatatggtggttctgactctggaaaaacatacatatattatttgattcgatatttattagggagtgaaaaactaaaaaataaagatatcgatcatgctcaaggttatgatttagcctatctggaatttaattttcaaggtagggtaatgacaattgagaggtctcttcaggatagcgcccattacagattatatgattcgagcattgaaaatgttagtgaagctaatctgttgatggttttttccaaaagtgcttcgtctaaaaagagtttttcatcatacttttatggtaggttgaatttcaaagaggctaaagtaagaacaaacttaagtaatactcttcataaatttaatcttaataatgtttttgaatttttttgtattgatgaattaagaatgttaactgagaagtcgttaattctttctgatattcctagcgaggagacaaaaagaaagtctgaatttaaattccttttaactcagagagatgatactaactccttagcagaaaaaccaaataaaaaagcaagatatnnnnnnnnnnnnnnanntgcaaatatttatgaggaattgaaagcgcaattaatttatcctgaatatgatcaagtcattgtttcaagagaacttgagaaagtagagcaagatattgaatcatcgaaagatatattgaaaggtattgttgatgcacttgatgataagaagcaattattaaaagagttaagtgatgaattatattcaatcagtgacagggaaaaatacttatcattactcattgaaagatttagtcttcttaaagaccaatactttatagatctacaaagaatagatgttgtatcacaggcgaatttctatttaaataattttgcagatatttattgtgagttctgtaatacaccgcaaaaaaaagaaaatgaaatatcatatgatgattgttttttgtcgtgtaatgcagaaaaattgaaaatcaaaagccagctgaaaggattaattgaatcaatcggatctaatgttcgcgnnnnnnnnnnnattatgttaagaaaaaatgatgttaatgaaatttatcaagcagaaaaagtgattttaagacgttagaagataaaaatataaaacaatacattcatctcttgaatcactttatgaatataaagacaatcttttaatggatcacacaaaacatagcattctatccttcattacaagataaagaagatgatgttgacgaacttaaatactccgccgaggactttgactccttaacagtagctgatttgtatgatatagaaatagcgatgcaagactttttgaatgatataaattttgaaaattctaaagataacaaagtgcgatttgacgaagatacatatgactttaatatcaatgggaaacgccgaggaatgtttggtaaaggtacccgtgcagtaatgcatgctatatttaccatttgctttgcggaatttttatcaagaaaagggaatccattcattggatttgttgtgcttgatagtccattagtgacgcactttgataaagatagaggggtttctctatcggatgttaatagcgtcagtctcagtgattcattttatcacgcattaatcaaaagggactataatttccagattgtaattcttgagaataaaggtccgacgttccaaataaaaattaatgatgcaaataaaatccataacttaaataagaatggaagctctggtttttatcctgtttaatacattaaaannnnaactgctaattggggtgctcgaaattatatttcgtttcgagcgctcagttcatttctaaataatntnnnnnattattttgggtactttcgcctctacacttccttcgggtggttccacaataatggatctcaccggcgtttgatattttataatctaaccccttagcgcgcgcagccccccacgcctgcccgcttcgcttaacagactggttttcatgcattccgcaaatcgtctcagaagccaccacacaagggctttcgcgtcaaaaatggtgcatgagaatcatgcgttttcatgcgctatagacatgcactcatgcgctctcaggccagccagggaaaaggcgtaaaaaatcccagtactggaccgggattacgtgggctttttttgctaatcagacaggaatttgctgacggcttgacagctttgacgcggagccatagcgattgagagtttgctgttgtttttccggcatttgtgctttctctgattcctgttcattgcgccggggcttcatgattatcgtatccacactttccagtgcggtaaatgtgtaggaacattcaagattctggcactgataccatgagcgtttaaccgatggtgcttcataggcggaggttctggcgtgtgccgtcgtaccgcattcgggacatttaagtgccattaatattactcctgcatgccgttaatgtaatccagacgttgctgaaagcgcagttgttgtgcaggggtgtaagagctctggcaatcacgaaccatcatggggtcaggcatcacaccggattcatccagaatcatacgataatccccggcaatttcaggcggtgttattgccagctggcgaaccagagcattgcgtaatatacgggacgcaacgtcaacccctccgcgccccttcaggaacggagccagtgcagatgtcagggctgctccattcgcctgcataaaattgctgagagcgtcttctgtgcaggcctccatcagttgatgctgcgagtaaatgcattcgcgcgcagcacagttaatttgccatttcagcacatccagatgttcccgctgtaattcgagctgtcgagcataatctgctggtttttccatggcagtgaggagtgattctatctgttgttcaacggcttttcggctctcactatgtccagcccacagaatacgggcatttctaaaactgataagcgcttggtctggagtgactcgggccatcatactgctttctccttctcagcacgttcctgacgaaccttcattttatgcatagctgctggagagagtttattactgaaatccagacgggccgcataatccggggcaactcccgccagtttaaacacggggtcctgttcgggcatcgcatcgttagtcagagccggtctggtgatatgtttatgaataaaatctttcagcagtgtgtccgggtcattaactgaatgcaccacaccgacaactgcgctggcttccctgcccattgttgatttgagcaggcttagtgtctggattagtgcttttccatgcgactgcataaaatcttcccagatttgttttgcgcgaatacccacaagggtgtcgtgcgcgtggatatactttccggctaattccgcagcctcctgcggcaaaagtgcattttcgctttcctgagccgccagcagctcatcaaaatcctcaagcgtttctcgtcccagcgcaatttccgtgcgcagttttttcatttcctttgagactacgccctgactttcacgaaatagcgtgcgccactcctcattcagggcgttcgtcgtggcttccatttcagcgcggcgctggcggattgtcgcaatattatccgctgccgctttttgctgacgacgtgcttcaagccatgcagatttggtggcattcactttctcaagcgcctgttgcgtcgaaacagggatagaaatttcaacgatcgggttattgttctgttctgggattgtcatgtcagcacctagtggtttgtcgtggtgtcaattgtgctgtgatgcatacaaagctgccattgaacgccattgtgcgagcgacaagacaaagannnnnnnnnnnnnnnnntctttnngctagccagaaaaggcctcgtttaactaagtctgtttcagacttaccttaactattcactactattcacttaggtaaaaaaaataggtaatacagaaggttataaggtgaagggttggcatggcagtattcatcgactgttcataactgttcacatgggaataaaattatttatggtattttttcataatgggtggtttttttattcctcgtagctatttgttttttgctcctcaccactattcacccttattcaggagtattcaacaggcacataaatagactgcatgtttttgccggggaataacattttcgcctctggccatggtgttgcatttcatactgatttttataaaactagatctgtccggttctttatggattcattcggatatattttacgatttaaggtgatgttatttaatatcaaggtttttatgcaggcccaatgtttataagttggatgcgattcaaaaatatgcccggaaattggggcctgcaatgcaaggcctcgtgtagaagttgtactgccttgctgtattggcggtggggttagcactatcaggtgcaatgacccataggatagtaaaccctgggggaatggtagttcctattaatgctcctgtatttatagtccgcaggcatggtatttattatgtcattttatatggtttaatcgggctttaaattccataaaatcaatatgtgacgctaaataaaaaatgcgtgcgcaggtggtttatatacacataataaggaactacctgaacccggataaattcatccggactgttgtggaaattaaagagggtagataaatgcgtaatatttctgtgtctgcgccagctcctgctgcgccattatttcctgtatcgaaccatcatgagcgatttttacgcctgcctgaggtgatgcacttatgcgggttgtcccgttcgaccgtttacgacctgatcagccgcgatgcgtttccgaagcagatcccgcttggcggtaaaaatgtcgcctgggcacagtctgaggtcagcgcatggatggcggaccgcatcagcgcccgtgggcggggatgtgatgcatgatgatacctgcatacattaaatacctttattctggcttgcttactgttgtcatttccaggtatagtttttccgctgtcgcaaaatcggcagccggaattggcgttccgtataacttattggcgacaattgacnccccttgcgtctttttttacgtcgtagctcaggcacaaccattttcagggctgtggtgtttatgcttacaccatggttctatcgagataatggtagtccgggcggggcagccttcgggctggccggtttccaataaggccggttacgccaaccccgttcgggctgccaccagtgaaattggcgtttccggtggtagcaataaccgctacttattggaggctgccatcatggctacaatcctcaccccgtcacacccgcaatatgtctttgtgtttgccgcaatccgccgtgctgacactcaaccccgcatctgtatgcttcgcactgtctcctgcgatgagcgttccgcgcgccgtttgctagtccgagattatgtactctccctttctgcacggctgcctgccggggaggtgacgctatgaaccagtttgagatttcctacgacgatgttgtaaggctgaaacatttacgcaatgtgggtgagtatgtaactggcatggcagccctgcaggactgttatgaaaagccagcaggtgcccaatgcgaacaactggtttccctcatttatctgatgacagagcaactggatggagtggtgcaacgctgccatgacgacctgatgaatgcggaggtggcctgatgatatgctgtgaatctcttctggcacttcgtgccgctctgtatcgccgtgccgttgcctgtgcctggctggctctaagcaatcatcaggaacgttattccggcctgacgctcgctgaacttgaagatgccatagcccgcgagctggaagggttctatctgcgccagcatgggcagcaaagagggctggaaattgcctgcgcgttgctttcggatctgatggagtcggggccgcttaaagcctgtccggttctctcactgctcggaatgacggtcatggatgaactttgttcccgtcacctcaacaaaccagcgctgcactaaggagggccgcacaatgtcaggaatgaaagttagccaggctgagaaagcagctcggggtcactggtcaagaattttacctgcgctgggcgtaaatgtactgaaaaatcggcaccagccctgcccggtctgtgccgggaaagaccgctttcgatttgatgaccaggaagggcggggaacgtggttctgtaaccagtgcggggcaggtgatggcctggcgcttgtaagtaaagtactggatgtaggcattagtgaagcggcagacagaataaacggcattatcggaaacctgctgccagtatctcagggaatgcttgaatctggttctcctgaaaaagaggacgggagaaaagctgcagcagtgctggctgcccgtttgtttgataagtcccgccagaccactggcaatgcctatctgacgagtaaagggtttcctgcactgccttgccgggaattaaccgctatgcataaagtcggtggtgtggcatttcgcgcgggagatcttgtcgttccattgtatgcagatggagagctggtaaatctgcagttaatcaacgctaatgggggcaaatgcttccttaaaggcggtcaggttaagaatgccttttacctggttgaaggtactgccaaagcagccaaacggctctggatagcggaaggatatgccaccgcacttactatcaactatctgactggcgatgctgtcatggtggccttttcgtccgtcaatttcctttccctggcgagcattgcctgcagtgagtacccaacgcaccagataattattgctgctgaccgcgatctcaacggtgcggggcaaacaaggggcgcagctgttaccggggcctgcaattgcacaatggcgctcccgcctgtgtttggtgactggaacgatgcattcacgcaaaacggcgaagaagccacccggcatgcaattcatgaagtaataaaaccagctgttgccagccccttcgacacaatgagcgaagctgaatttaccgcgctgagcgtcagcgaaaaagcgcagagggtagtggatcactataaaaattcactggcagtagacccgaacgggcagctcctttcacgctatgaggcgggggcctggaaagttatctattacgccgattttgcccgtgatgtcgctgcgctgtttcagcgcctcgacgcacctttttcatccgcgaaaattgcgtctctcgtggaaaacctcaaactgatcgttccgcaacagcagaatccggcgcggcaacttatcggatttcgcaacggtgtgctcgatacccggacaggattgttcagcccgcacgataagaagcactggttacgtacgctgtgcgaggtggattacacgcagcccgttgacggtgagtcactggaaacccatgccccggcattctggcgctggctggatcgtgccgcaggttttaatcctgaaaaacgggacattattctggctgcattgtttatggtgctggctaaccgttatgactggcagctgtttctggaggtcactggccctggcggaagtggaaagagtattcttgctgaaatagcaaccatgctggcgggtgaagataacgcgacctcggcaaccattgaaatgcttgagtcgccaagagaacgagctgcgttaataggtttttcactgattcgacttcccgaccaggaaaagtggagcggtgacggggccggactaaaagccatcactggcggcgatgcggtatccgttgatcccaaatatcagaacgcctattcaacccacatcccggcggtcatcctggctgtgaacaataatccgatgcgcttcactgatcgtagtggtggagtttcacgccgaagggtgatcctgcatttccccgaccagatagccccggaggaacgcgatacccagctcaaagagaaaattgccagtgagctagcggtgattgttcgccagcttatgcagcgtttcagcgacccaatgagtgccaggacattgcttcagtcacagcagaactccgatgaagcgctcaccatcaaacgtgatgctgattcagcttttgatttttgcggctaccttgaggtcctacctgacaccacgggcatgtttatggggaacgctaatattgttccacgtcagcctcgaacttacctctaccatgcctatctggtctacatggaggctaacggctataaaaatacgctcagtctgaccatgtttggcaaggggctaccgttaatgctcaaggaatatgggctgcagtatgagaaacgacggaccaatcaaggaatgcagactaatctggccctaagagaggaaagcaatgctgactggttgccaaaatgcgatgagtttgcagcgaaataactgacctaagaccggctgtgccggtcttaaatccgctacaggaaattatctcaaaatatatatcgataaaatttaaaagttatatgctaaggcgtcagcggaaaatgcatctaattcattgttagatgatgtttatttttgaattgatttaaacatcccatcgagttgtaatttatttatgtcggttttctttatggctttaattaagttttcaataacttccaaagaaaaaattacatctttcttttcaattctaacccccccgtggtggctgcaagcattaaggatgtcctttgtaatttcaacatcatttttcattaatggttcatagtccagagcctcaataacagaaactaaactacctagcatttgctcttggtattgaacgttgtttaaatgcattatacgaatattaacaagcatgagaatatattctaaatatctcctggcagtatttcctttctcttgtaaagaatcacgatcatattcctcaatactcatgacttcattatgtaaagaggctattttgtgctctgctaatgaaatatttatcgcatccatgaggtttcgtgagaagcctgtagatgtaacatgaccatttgcgggccttgttaaaatacatgtagtatagcaatttatatttggggtctggattgtctcatttactcttttaaccgttctataaacgtctaccatataagaacctgagttttcaaatgaacatgaagagcattttgtattatatattctatttagagataactgattgtgatagtatccctttaagaaagcatatatagtgtcattaaactcgacaaacacaacggactcaatatatatatggaatttatcattggggtgccactctaattcaagtcttcttgtagagtcatcaaaggaaaagtttgaaataaaattccagttacctaaatctataaaatcaacgatatttctacctgcaccatggatatttttatttattaaagttgtgattgagttttttataatatcccaatcatgaatttcatgatcgaatttattattgatggtttcttttatttgattggaaaagtttgaataactagtcacttgttagcctcaaaattaataatgagtattaaaatttaattgatattgtctataaaatgtagcgatgcaattttattgcaacgaaatgatttttacaacataccattatcgctaaacaaaatcgcacccatcaaatcaacttacgttacaatcactacaaagcgattgcatttaaattcaaaacagttttctgttgggcgcattttttgttgtactggactaaagagaaaaaatggggtaaggaacaaataccttccgtgctcaaaaattaggtttttatgcacttattaatcagtcaaggtgaacagtaaagtgttcacttcttatcaatcgttaatttcatatctttttgaatattaatgaaaaaaacacaatgagtagtatgaacagttttcccccaaaaaaagttttttctgccttgagaatgcgcggaaagcgaacgccttcaccaatgtgtataggggtgtgtgtagtttaaatcttctattttaatttatgtattaaaatcattgtgttggtggcgattattggttcctattatcgcaccatttaaatcaagtagttaccccatatttaaatacaccacgtttcctcctgtgccgcatttgtgccattgtaaccctggcaattaatcaaaatactgttctgacatcaggcaatgcaggtgcagacatttaagccaattgctgccgccattccttaacgtggtcaatcagagcgcggagctttggtgcaatattgcgacgctgtgggaaatacagatagaagcccggaaattgtggaagaaagtcatcaagcagagatacaagcttaccgctttcaatatacggcctgaaagtttcctgagtggcaattgttattcctccgccggcaagagccagcctcaacatcagacgcagatcattagtcgtaatctgcggttcaatcgcaaggtcgaaagctctcccgttttcttcaaatggccagcgataaggcgcaacctccggggactgacgccagccgatacacttatgattcacaagttcacgcggatgaacaggtgtgctgttggctgcgagataggagggagaggcaacgaccatttcacgctgcctgccggtaaggggcacagcaatcatgtctttttcaatgacctctccgagccttacgccagcatcgtaacctgcggccacgatatcgaattcctcatccgtgacaacaatatcaagcgtaacggctggattggctgctgcaaacgaagcgattagcggacctgaaagaaattcttcagctattgacgtcaccgcgattctgagaagtccgcgtggcacatggtcagaaaccatctcttcgaacgctgcctcaataccggataaaggtaatgacagcgatttatgcagccgttctcccgcttctgtcaaattaactgagcgcgtggtccgcattacaagcattgtcccgaatgcatcttcaaggcgtcttattccctgactgaccgctgaacgggtaacgcccagccgtgcggcggctttactaaaattactctcttctgctaccgcgataaaaatgggtaaaagattaagatcgattttcattgtttaatgccgctaaccactgagtacattgaaagcaggatactggaaccaatcataaagttctattctctctccgaacacatttgaaggagaacgtaatggataaggtcatattaattaccggcgcatcaagtggtattggggaaggtattgccagagagcttggaatgacaggtgcaaaggttttactgggagcacgcagagttgagcgtatcgaagccattgcaaccgaaatctgccgcgcaggaggaattgctaaagcgcgggagttggatgtcacagaccgacagtccatggccgatttcgtgcaagcagcgctggatagctgggggcgagttgatgttcttatcaataatgcgggcgttatgccgctttcaccgcttgcagcaggaaaacaagatgaatgggcgctcactattgacgtgaatatcaaaggtgtactgtggggaattggcgctgtacttccggtgatggaagcacagggttccggtcagataatcaatcttggttctattggtgccctttctgttgtgcccacaggcgcagtctattgtgcatcaaaatttgcagtacgggctatttctgatggcttacggcaggaaagctcgaaaatccgtgtgacctgcgtaaatcctggcgttgtcgaaagtgaactggcttcaaccattacccatgtggaaaccatgaaggcaatggacgcctaccgttctgttgcacttcaacccgcggatattgcccgtgctgtaaggcatattattgaatctcccgaaagcgttgatacaaccgaaattaccatcagacccactgcatctgcaaactgaagaataacttttacattcacgttttattaaataggtcagaaggaatatttatatatccctgtgtttnnnntagcaagatacattatgtattgctcaccccgaaggagatgaaggtttaattacagaaagattatttttcacaggaagtaaacatgactcatgtttaatgtctttatatataaaactcatcctctcaattgtcagggaaattagcgtgaatactatctgttctttaattgttgtggttgcactgtctttattatcattcagtagcgtcgccaaaacgattactgccgtcggttcaaccattaacagcactgaaaaagaaatttctttacaggcagaaaaacaagggaaatcatataaaattctgggcgcgttttttaagaacagagtttatatgatagcaaagttaacaccagtcagtaaaaatgatgcttcataaggctcatggtataatttttaagacatgatcaagaagcacgtctattgactcaaaattgtcatttgtcaggcaatggaatacctgacaaatgacgctatcccaatctattgtaccagtcgttctgctaattctaccgatgcttcggtctggagtggtagagtaatattggacacagttttattttctctctttttcgagggctgtatatcaacaggaagaatacatccctaagcggttaatgctggagtaatcaatagaccagcattaatcacagatgattaccaatcagacagaaatggttaaatcgtcgaattcatatttaatacgttttcttacgccgctgaacagcttgaaaaggatgcatattttaaatatcagtgaaatgaacagtttattgccgttattaatagaaatggagggataaatacgcgtattctactgttgcaacaaaaacaacggtattgatcggttttcataatgaagtaacctgacagatatgaaaatgttgattgaggctaaatgcccggattaaggttgtcgaggggagccaggtggttttttcttttggatgatctccattgctggatagtccccttgtacagataagtccgctctttctcgctcaaagcggcccctggaattgaacgcagagtgactacctgacacaatattgcacagtgaagagtcggtcgttgttaacgttcagattttcaatgtatcaatgaccatccgcagagcgggggagacgttgcgatgagggtaatagagaaacaatccctccattcgcaggctgtaacgctgcaacactctgataagcttaccgtgttctaaatcatccgcgaccagttcaacaggaacataggccaacccgaggcccagccgggcggcttctgcttccatatagctgtcggaaaaggcccattgtccttcgggttgatgagtgatttttttatcatcctgattgagttcccactggtatacgctgccgtcggcaaactgataggcgatacagggatgcgcctttaaatccgccggggtttgcggaaaaccatagcgacgaaaatgttccggagtccccacaattgccatctccatatcgggcgtgatgcgtaccgcgaccatgccctggctgacttcaggccccaggcggacacctgcatcgaatctttcctcgatgatatcgacgaaccggctctcatttatcagttcaagccggatatcaggatatcgctgtttaaataccgccagctttggcagcaggcatttatcaatcgcgtgctggctggcattgatacgcaccgtgccggagggcgtctctcgatagtgcgccagcgtggcaagcccaagatctaacatttcaaatccagatgccgtcttctggtagagctgctcgcctgcttgcgtcagcgacagtttacgcgtggtgcgcnnnngcagctggacgcccagcctttcttcaagctcgcgaacagaacggctgactcctgactgagcaagacccagccgcttagccgctgcggtaaagctgccttcccgcaccacctgcataaacaggtatagctcgttgtagttctccctttttgccattgaaacattccccttcatgccggcaatctcagcattaatttataacaatatggtattaatcttagcattaatcgccccctaatcagcactaattctgctcactataatgaccccatcaaagtaaagcaccgcagcgttgtccgtcggaaacctgtatctctctgttgttttttatggggatttttatgaaagccttcacccgaacgctaaaaaccgcgatgccggtcatgctgcttttcgcatcattaagtggagtcacgacaatgagttatgctgattcaaccaatcctaatgcccctgtgtccatgaccgataaatgggataaaacgttcgccgagagccagaaagtcgatcaccgtaaagtctcgttcccgaaccgatatggcatcaccttagtgggcgatctttacctgcctaaagaccgtggcgatcgcaagctggcggcgattgcggtcagtgggccatttggcgcggtgaaagagcaatccagcggcttgtatgcgcagacgctggcggaacgagggtttgttaccctggcgttcgatccttcttacaccggggaaagcggcggctatccgcgaaacgtcgcctcaccggatatcaacactgaagatttcagcgcggcggtggatttcttagggctgcaaaaagaggtagatcgcaaccgtatcgggctgctcggtatttgtggctggggcggcatggcgctgaacgacgcggcgatggatacccgcgttaaagcggttgctaccagcgtgatgtatgacatgagccgggcgatgggccatggtgtgggggatggcgaagaccgttattctaccgccgaccgtcgtgctgttctgcaatatttgaatgaacagcgctggaaggatgcgcagagcggaacgttcgctcacggtggtcatgatattaatgtcgatagcaacggcaaggtcagtgcgggcgagcgcattctgccagaaacgctgccggcaaatcctcatccggtactgaaagagttctttgactactatcgcatgccgcgcggcttccacgaacgttccgttaactctaccggggcgtggacggcaacgatgccgctgtcatttatgaatatgccgctgttgagctacgccagtgaaatcaccattccgacgctgattgtgaccggtgagaaagcacattcacgctattttgctgaagatgcttacaaggcggttggcagtaaagacaaagagttggtggtggtaccaggggcaaatcacgtggacctgtacgataacgtggccggaaaaatacctttcgcgaagttcgaacaatttttccagaccaaactgaaataaaacctcccctgaattgatgcaaagccaccggtctatggccggtggcttttatcctgatctttgtgaaatttcactatgtcgacactaagccaaacaccatcacctcatcatcagcacgcatactggggcggtatttttgccatgaccctgtgcgtgtttgtgctgattgcttctgaatttatgcccgtcagcctgctcacgccgattgcccgtgacctgggcgtgacggaggggctggcagggcgggggattgctatctccggtgcgctggcggttctgaccagcctgacgctttcaacgctagctggaaagatgaatcgtaagttcctgctgctggggatgacggttctgatggccgtatcggggcttattattgcgctggctaccagttatctgatgtatatggtcggtcgtgcgatgattggtgtggccattggcggattctggtcgatgtcagcggcaacggcgattcgtctggtgccgcagcatcaggtcacgcgtgcgctggcgattttcaacgccggtaatgcgctggcgacggtcgtggccgcgccgctgggaagctatctgggggctacggtcggatggcgaggcgctttcttgtgcttggtgcccatggcggttgtcgcctttatctggcagtgcattagtctgcccagcatggatgcgaataaaagccacacgtcatgtggcgcggtattccgcttatttagccgccgcatggttgtggtcggcatgatagcttgtggcctgtttttcatggggcagtttgcgctattcacctatgtgcgcccatttctggagtcggtgacacgggttaattccttaggcttgtcgttgattttgctgattatcggcgtggccggttttattggcacgctggttgtttcgacatttctcaacagaaaattctaccccacgctgatggccatacccggactgatggccgtcattgccatcggtctgatgcttaccgggcatcacgtctggatggtctcgctgctgttaggactctggggcatgctggccaccgccgcgccaaccggatggtggacatggattgcgcgtacgttgcttgacaacgccgaagccggaggcgggctcatggtcgcggtgattcagctctcaatcgcccttggatcaacggcaggaggcatcgtgtttgaccgccttggctggcagagtacgtttgccatgagtagtgtgctgctcctttgcgcgggcgtactgacctttgttacagcacgccagaaggccggtgcgctttagtccggcgagggcgcgcgttgctgaaaaagttacacaaggcgatgagcaaccactatgggtagggcgctcttttaaacgatttaggtgattttctaaaacggctactgcaaatttttctcttaatttatggtatttcccccggaggtgagaaagcgctttccacgcccggccgcaaggatcaggacgacgggggcaggcatgaatcctcctcctgatggagacgtacagaggcgacttctgccagcacggagagggccagtgtatgcgcattccgggctttggggaatatcccgacgggtgcccggatttgcgctgtctcctccctggaccatcccagctcgtggagcttttgcagacgtaacgtgtgggttcgatagctgcccaatgcgccgagataaaagggttttgcttctcgcgcggcctgcaacactggcagctcccggttgagatcatggcacagcaaaatgaccgccgtatcggtatcgatctgagcgctggctgaggccggaaaaagatcgaagatatggctgtcatagcctgtggctgctgcaagactcgcggttgcctgcgcctcaagagaacgtccgtaaatcatcagcctgacgcatggcctgaaccccacctcaaagccattgagattccagcccgttcgggtttgcgtgggcaggcacaccaacgattgtgcttgcggatcgtagcgcagccccgccggttttctctgttccaggcggttcagcacggcgagcagaggctgtgccgagcgtagtttatggagcgtcagcgtgatcccaccgccgcagggcagaacgatgtcaaaccacggcgaaccttcgccatagnnaatntcgcgatcgcagcctgagcccatcatctccagcgcttcaaaagcggcagcggcctccacgcagccgccagagacaaaaccgcagtaacgaccatcttcgcgcaccaccatctgcgccccnagcnnnngcgccgcgccgccgcgtatctccaccagcgtcaccagcaccgctcctttaccggacattagcgcttctacggcgaagcgcagaatggtccggtggtcatcggtgagaaacgcctgctctggcttatgccagtgttcgtctttatcaaaaagcgggtatgacattgttcctccttaaaccacatccggcagcttatcgagcagcttatccagagtgatgggataatcgcgtacccgaataccggtggcgttatacaccgcgttggcgatagccgcgctcacgccgcacaggcccagctcaccgacacctttggccttcatcggggaggatatggggtcggtatcatccaggaaaatcacttcctgttttgggatatccgcatggaccggcacctcataccccgccatatcgtgattaacgaagtagcccaaacggtcatccaccgccagctcctccatcagtgccgcgcccatgcccatagtcattgcgccaatgacctggctgcgtgcagttttcggattcaggatgcgtcctgcagcacacacagcgagcatacgccggacccgaacttctcccgtcgcgctatgcacgccgacctccacaaaatgcccggcaaaggtcgactgctggtactccttgctcagtgttccgaattcaatgctctcttccgctgtcagtctgccgcctgcggtggcctcatgtagcatggcgcttcgggtaccgttggtaatcttgccgtnggcaaactgcgactgctcaggatcaaacccgactgccgaggcaatcatttcgcgaagcttcacacaggcggcgtaaacgccggaggtggaggtattcgcgccccattgtccaccagaacccgcagaaaccgggaaactggaatcgccgaggtgaaccgcaacctgctccagcggtacgccaagcatttccgctgccgtctgggccagaatggtgtagctgccggtgccaatgtcggtcatgtccgtttccacggtaacggtgccgtttggttcgaggtgaacccgagcccccgatttttccagcagattattgcgaaagcccgccgcgacgccgtggccgactagccactccccgtcgcgcacctgtccgggtgtggcgttgcgctgcttccaaccaaatttatccgctccggtgcgcaagcactcgataagctgacggcgagagaagcggcgcgtcgggtcggcggggtcaacctgagtgtcattcaggatgcgaaactcgacgggatcgatgcccgctttttccgccagttcgtcgatcgcgatttcgagcgccatcagaccgggggcttcgccgggcgcacgcatggcgttcccttccggcaaatcaagcgtggcgagccgcaggccggtatgacggtttgccccggcgtagagtaattcgctttgctgtaccgccgtttccggngtgccgccgggcaggtttccagaccagctttcatgtgagatagcggtgattttcccgctctggtcggcaccgatacgcaagtgctgaagggtggcggggcggtgcgtggtgttattgggaatagaggggcgggggagcatcactttaaccggacgtttcaccgctcgggcggcgagggccgccagcagcgcatcgcttctcaggaacagcttgccgccaaaccctccgccgatatacggggagataatacgcacattctccacgggcactttcagcgtttttgccagatcggtgcggcaccagtcaatcatctgatttgaggtccagagagtaagcttatttccatcccagacggccatcgaggcatgcggctccatcgccatatggctctggtccggggtcgtgtaggtagcatcaatcttcaccgcagcggaggagaaagccccgtcaaagtcaccgacgttcttgtcgggcgtgtcttccggcggctgactgacggcctgtttttcgtccgccagggagtaagctcctttnttacggcgatagtgcgcctgcaccagcgaggccgccgctcgcgcctgttcgaaggtctcggccactaccagagcaatggcctgatgatagtgctcaatagtggggccgcctaacagcctggcggtgtttttgtcgcctttactgagtgccccggcgttactggcggtaatgacaggcagtacgcccggcgctntttgcgcggcgtccgtatcaagggcggtgaggcgtcctttggcaatggcggaaccgacgatatagccataggcggcgttgggggattcttcatgccattcgtaggcgtagcgtgccgtgccggtagttttcagcggtccgtcgatgcggtcatggggacgaccgacaaccttcagctgatcgatcgggttttcccctgcgggtttatcaaatttcatgcttgtgccctcgcttcagccagtacggaggcaagcgttcgcttcgccaacaggagtttaaaggtgttttcagcggtgggatgggcgctggcgaacagcgcgtcatatacggcctgcgccccctgggatagctgagcatccgcagcctcaatgcgccagggcttatgtgctactccgcccagcgcgacgcgcccgctgccgtcaggctgaataatcgccgcgaccgataccagggcaaaggcgtaggaggcgcgatcgcgcaccttacggtagatatgttttccgccgagcggcggaggtaacgtcaccgcaacgataagctcaccgggaagcagggcggtttcaatgtgcggcgttttccccggtgggtgataaaaatcagccagtgtgatactgcgagtctttccctccggcgtgatggtttccaccaccgcatccagcaaccgcattgcgaccgccatatcgctcggatgggtggcaatgcaggcttcgcttacgcctaccaccgcgtgctgacggctaaagccttcaagcgccgcgcagccgctcccgggcaggcgcttattgcagggctgattggtgtcgtaaaaataggggcagcgcgtgcgctggagcagattacctgctgtggttgcctgattgcgtaactgaccagacgcgccagcgagcagggcgcgggagagtaccgcgtaatcacgacgcacgcgctcgtgagccaccaggtcggtgttccgtaccagtgcgccgatgcgcagcccacccgcgtcggtcacttcgatcttatcgagcccgagcccgttcacatcgataaggtgggtgggcgtttcaatttccagcttcatcaggtccagcagattggtcccgcccgcgataaattttgcgccgggtacgcgctgagcgctaagtgccgcctcggcgggggggttcactcgttcataggtaaacgccttcatgattttatctcccccgcagcgtcttcaatggcggcaaggatgttagcgtatgcaccacagcgacagatgttgccgctcatacgttcacggatctcatcggcagttctttctggaggggaaaccaaatcgaccgtgacgtgactgggaatgccgtcctgaatctcttttagcaccgctactgatgagcaaatttgcccggaggtgcagtagccgcactggaagccatcatgcttgataaaggccgcctgcatggggtgaagattatctggtgaacccaggccttcaatggtggtgatctcggccccctgatgcatgactgcaagcgtcaggcaggcattaagcctgcgaccattgaccagcacggtacaggctccgcactgtccgtgatcgcaacctttcttggtaccgatcaaatgcagattttcacgcaaagcgtccagtagcgtggttcgggtatccacctcaagctgctcggttttgccgttcaccttaagtgtcaggggcattatctcaggcgcgggtgtagctgccggaacgcttgccgcaagcgtagaatgaggataaaccacggcggnnnncgccgttgcggcgctcactttaatcagatcgcgacgggtcaaacttaaatcgtgcggctcatgcttcccaacccgattatcttcggggtattcgccttggttgctcataccaggcctccggtattctaaaggggaaaataagagtgcgttgcgagagtgctgatgcttttttaaacgttaagcatagtcggcgacagcaggaggattattcttaaaacgcgaatgcagctatgagcccggctaataaattcatgttcgccgggatgttgatgatgatgggagctggtttattgctttagttgtacgatgcaaaaaccgataaggaaacctgtgattgtcagctctgcatcaccctgcaaatctatgtcacttctaatataaaaatagggagaaatgatggtgcttatattctttggtgattagacaaccatcttgttatacaaaacaatacagttctttacatttaccttgttttatgaatactcctaaagaggtgtataacataatggtacaagcagggtagatatgaatatatttgaacaaactccaccgaaccgcagacgttatggtcttgctgcattcattgggctgattgctggcgttgtttccgcatttgtgaagtggggggctgaagttccattgccgccacgtagcccggtggatatgtttaatgcagcgtgtggcccggaatcattaatcagggctgctgggcaaattgattgctcgcgtaattttctcaatcctccgtatatttttcttcgagactggctggggctgacagatcccaatgcggctgtttatacctttgccgggcatgtctttaactgggttggtgttacgcacattatcttttcgatagtgtttgctgtcggttattgtgtggtcgcagaagtatttccaaaaattaaactctggcagggcttactggcaggtgctttagcccaactttttgttcatatgatttcattccctctcatgggactgacaccacctctgtttgatctcccgtggtatgagaatgtttctgaaatttttggacatttagtctggttctggtccattgaaattattcgcagagatttacgaaacagaattactcatgagccagaccctgagatccctttaggctcaaacagataatgcattgaatgataaaaatggcgcaaatacagcgccatttttataggttaaaaacattgctttttatattctgattcagatagtcagtgagtatatcgcgctacttcaggatgatgtagatccgaagaacgctacagaagagaggcattgttgctggcaaatagaagaagtatcggggtttgttacccctgaaaaacgaagccccgctattacagctggcggggcagtgcaaataattattgtatatttataacggtgtcagcccgtatttagcccttgcacgattgcaagcctcattgacgactccgttctcaccagacatggcgaattctctgcatgtggacgatcgatttttatatatcgtgcagcaggcatttttgcccggggttcctgcaagggcaatacatcgggggtttttctgattagttccgctcatgcatcggtgaaaaggggatatttgttcagtgagcctggcgggaatagtgccgccagcatcgtcggcttcggcccagtagaaagagacgcggaaaaatgcacaacaggcaccacacgtcatgcatggattcagattgctcataattcaccagtacagctataaatcgtaaagagaactgcggtacgtcgtatgcagggacgtatcgcggttggctggtgtactttcgatagtgtgagtattgaatgatttccagccgttaccgattttacgtcctaattagtgaagaaaccactcgttagcaggccgcctggtacctttccgtgtctcctgaacactgtggtgtgcatatgagaaagcctatcgttacaggtgatattgacgatcgcttccacatcatttaaacgatttttgagtctctgaggtggaattcttccctcgaccgatggataagtatcagtccgccgaagggggcttagccggacaggaatcgctaatcttaatgaatttgtcgttatagaccagatagtgattccccggctgacgtaactcaggctgatgaaccacgtctcccggacgtagataccaggcatcgccttcctcttcggtcgaatcacatcctggtttaatcagtagcttaaaccacgtgttgccggtgttacttaccgttccggtcacctgatcgaaggaccatttaaactgaacctgacgtggtcgtactaccagaatggtatccatcaccaccaccggctccgtgctaacctcaccgccggtagggctgcgttttgtcaggttacgagtggggacctcgcgaaatgagacccggtagtagcgctcgcggttatcctgtggcccatgatagtaaaatttaaaatactcgctctcaccagcctgcaacgccagctggcggggggcgaaaagcagttcaccatccaccggtcgggtgcgtaattcactgctgcccgggctatcgatagcactgatggcaatacggtatatccgcgcgcttttgttgttattcactacacgtttgctgacaaagtcagtctcggacggcagtgaaaaagtcagattgccgaccgaaatcgcctgtgtcaaaggtgccgccagcatacagaccgctgtcagcagggccttagttaatgttacgccacgtcgcctgaacatgaatttctcctgaagcgctgacttcgccaaaccagccgttatcatctaccgtacgcagagaaatggcgttatccattggaatcgaaaatttgactgtggtcttatccatctgccccacttcgccagagatatcagtccacggtgtggtcaaccacagcgcatcggtcatatcccgccagctatcatcgcacccggcatcgtaggtttttgtagctccgttgcgggtaataaaggaaagcgtcgccgggaacggtactttcgccttaccgtcatcggagctgaagacacaataggagcgcccgccaatcacctgcgcgggtccggtcaccttgatcagcacttcgtcggcagctgttttaccgctggtggttacgatatagccgaaatcgagtgccgactcgccgctgccgacatatccctcccgcgacggtgtctgagtatattcatcggagataatactgatgctgaaatcacggggtttgataatcagcgtgttggaggtagaaaattcataccagccagactccggtgatgtggtgttctgaaagcgaaagttgaatagatctttggtgttgatatcgctgattccctggttcaccatctgcttaaagaagttgctcgagaagaaaacatagatcgagtctgcgctcttcatctcgttgaaggtgtagtaataggcagtattgctcaccggtttccatgaactgccattcagactgaactgcatatcgtacgccccgacggccgaggctaacgacgagttggcgatcgccgggaatatatggattgaggtgttgctgagtccgtttgtttgcagggtatagttaaccatcttacaacttaatcctgaacggctgccgatggtttgcgtccggcagtcggtgttcccttcgcccagagtcggtactccgtcgctgttgataaatacttccgccagcgagtgggtatttatcaaccgtagatttgctgctttcgtatgggtgacgttgcgaacataccagttgccggaggcctgatccttacagcgtgcgccgctgctggcgtcatagttcacagaggtctggcaggcattgatggtcattgtaaagctgctgccgacgggcatttgttgcagatactggtaaaacgcgtctgacaacatgccgtgcatccacttcgcgccgccgctggtcaccgtcgcgccataaaatccactggtgtcggtggtttgcggcaggataagactggtggtcatattacacccagcgtaccagttgatgcagcgcaagccagttaaaggagatgaaactggtgaattttccagccacatatcaaacttccagttggtataaaggccggtgttgtaaccgttatcaatgtagccgaggctttgctgatagatggttcctgaaccattgtattttaaaccggtccagcggttggcaccggtcaggcgcggatccagcgccccgccaggagtgacgaaaaagttgtcgtctgagttgttttcgacaaacacaaactcgcgtgccggtgcatccgcccaggttgttttgctcactgccgctctgagcgcagttactggccagattagcgcaaagattatcatcgctatcagtaggttaactctcattctcttctcctgtctgcgtcaccgccgcccacgatgagaggccgctgcagaccacatcaccgacccagacggcaccgcgcgcctggttgagttccagtgccacttcgcaggttttattgccactgtagcgaaaatcgatagtggggtatttcttatccacgtccatgacaaactcgccgttttcatcggttcgggttcggccgatatggttgttaatccgtgcgttagccagcagtgtgccgtcttccgcacggatacgaccggagacggtaaccatctgcttcacctctggctcaatgacagcgacattgcctggatagagagtcagatgacttttgcgaccgctgacgatatcgtaactgtcgagtgagtttttgctgttctgtaactccacctcatatcttccatagggagagagcgggagatagttacgcttgccgttaagcgggaaaatccgcccgttgattttggcgctgatctgaccgtcgtcctccagcccggtgttgaatatcaccccagcgttgccatcagtccgcccgctggcagcaatgtttttaccctgccagccgacgctgccattggcggttaaattggtattgacgtagccgtccgccgcgctattgacgttcagcgttccgctggcgtagcgagcgtcgaactgtgcatacgccccaccactgagagttttgtcatcaccggtatcgccggagatggctcgtgacagattggcaccaacagtgcgaatggtcccttcatcaaactgcttgcgtgctgacaggtttgccatggtgtagccgttttgatgagtcatccctgcgctaaaccagttgcccagtggtagcgagagatcgagagcgatatatttccctgtattggcgttgctgtcgccgttgttatagcgctgaataccggcccgcaggccaagcgaaccaaaggtaccgctgtagacattttgatagtaatctgccgtgtaataatggctgttgtaacggcggtcatcattgtagctgatgctgaatgtgcccagcttcgaccacagtgagttcaggttgagtgtgccgccgatagcacggttgtcggcatcgctacgtcgcaattgattgccaatgcgggttttttcctgattaacccacagcgaactaaagcctcccggtagagtggcgctgatgctgccgatgctgctccatgagctgtcactggccagcatattttgcaggttaacgttgatcgctcccccaagcggcagcgtcagacgggtttcacccaccgcctgattatcgtatccatatcccgttgccgcccagctaagcgtactcagtgagccggaggtcgaggcacctgccagccaactctctttagctggtcgcgtctttttcccgttttccgaccagcgatccatatgaaagctaccgccccatacctgccacgccagtggtgcaccgacgccgcgcccccggctaaacagcttattgacccgctgggtgcgtttgctgatcacgcgaccgttaacgatcacctcaacttccacatcgtaaataccgtatggtagaccccgggtatccacttcatgattgcccatggtgaagttctgaacgcttagtaaccgcccatcacgggtgagatgtacttcacccgccgccggtaaaaaggcgatcactggcgtggctgactggctgctgtcgaagatggtggagctggcctggtttccccaggaaaggccgtaaatcttccctgctgaaatggcggtcatcggccctaaggactgcaagttccaggtgtcgagcgttccaccggcaaatcggtgaccggcaaaatcgcgttcatacatcgctttatataattcactgtcctgttgaccgctaccgatcccgtacagcgagccgtcgagcaccacatgatgttcgcgcagtgcagtaacgttattcagcgacagatagctggatgtgttgctcccgccgttacgcaactggttgttatagatgccgaagttatagctcagattactgctgagggtgttaacactggactgcccgatgtcttcgctacgtgagcgtagtacagtgcccagcgcttcgcgcttgaccaccagctgcagcagcagttggcgcaagctgagatccagctgcgcgttgtcagtcagggggatggtaagggcctcattgaacggggcgttcgccagagccatcagctgctgtcgagtttgttcgctgacactggcgttatcttcactctcttccagctgtattttccggatgcgtagctgtccatcatccaaccagataaaagcgctgccgattcgctgatcgtcctggcgaccctggctaccggcgagatgaatatagagcgggacgctcatgccgtcctgaagcgcctgactgaaggcctgcggaataatcaccccacctatttgctgcgcacttatgtcagcagcgctggcatcgggctgaacgaacaaaaagaccatgccgaaggcaaactgggctttcagtcctggggagaaccgtcgtaaaggcattgtcgttatccatctgcacagctatctatttcacgggaatgaacttatcaccctgccaaagtgcaacccgtcctttgttatccgccgtgtccacgcgggtaaaacgacgcgacttgcccggcatcaggtagtaattctctttacactctttaccattggcggctttcaggcaggggccgtaggcgaggatccgcagcgtcgcatttcctgtatttgtcagggtgccgttggcgtactgaaagtggtagtttgcctggcggggggcgacgaccagaatggtgccgatgcgggcggaagcagtggccacagcgctgcggttggcattatcgcgctgcgcatcactgagggcctgatcaaaccagacaatgcggtagtagcgctctttttcatctgctggtcccttatagaagaagcggatcacttcgctggcttgggcgggtagcagcaagctggcgggagtgagtagcaactcgtccggcttgtccattgagataacctgcccgtcgtcaagcggtgaagagagccgttcgagacggatattgataaggcgaccactgtcggtactgtttttgatcgttttgctcagcgtgctgctgtcactgttcataaacgatgatatatcgccgacatccagcgcctgggccggagatattccggataacagcagagcgagaagcagaaggtgctttttcataacaattccgtccaggaataaagcaggggggctacccctgctggtacatcagagagattaactggtccaggtcgcgtcgaactgtacgctaacgtcgccgctccagatgccttccggtagagtgctgtaatcggttactgcggtggtaccattggtggtgccgctgatgatggagaaagtgaaaccatcctgtgcggtggtacgattgctggcattgtaaccgtttgccagcgggctaaggttgccgcccagtacgccgttggcggtatcgatcatcacggtatcgccagttttttcgactgccgcgccgttataatccacgcccacattcagtgtggaacctgaggtatccaactgggttaatgtgttggtgataagacgtgaggtcagtttaaaggcggtagccgttgagtcaccctcgatagccacgtcaaatagacctttctgtgagttaaaacctttaatgccttcggcatactggaacgccaggctaccgagtggcgtcacaaccagcttactggtggtgtcttttttggctgttgccgaccaggtcgctacagcctgagctgttacgtcagcagcctganccacacccatgccggtaaacaccgttaccagagctattgccagaaccttttttttcattgtatttcttcccgagttgaattgaggacgtgatgtcccagtgagtcattttttaaaactaacttgcctggagtttactgaaccaacttatataattttgagtacagcttggcctctgcattacgccgatgggtatacactgtctttacactacaattttcaattctggcaatcgatttaggcagcattccctgagccgtcatgcggataatttccatttcccggtcagtgattttatctttcttaatatcttttctcaggaacctgccattaatcacataggccagttcttttctaatatcacgactcagtccagcgtataccacgcccctaatattgctgttgtaataccaataatttgctaaggcttctgactttctggccgcaatcaatacgacctgtttcccctttaccgcggataaccactcattatcacggtttataaattcagttaaagaatccgtattgagattgataaacacgaaatcttttctgattttctccagcgatagataaattaatctgtcgatatccacaatcagttcagatagtcctttatagaagtaggcgtcatggggagaccagatgtatttatcagaacggttttgacattccatatggttttcaacctcatagtccctgctgtaatcattttgccatgtcactactttccaaacctgtaatttttacaggtacattcagtttctttagtaaatcggaagtaaataagatacgtagcacatatcaatataggttaaacgagattaagttttaattatttcgattaggtttaaatttatgtttttttcctgatgagtgtcaatatgtgaacagaaaatgaattccatggttaagtcaatatttacaaaaaatgaaaatatngcttttttgataagaagaaaaagacattcagtttcataaggttattggcaatataacgttcaattcttacttgcattttatattagccaggaactttgccctgaggtgttaggaatagtcttaatgtgttgtgtaatggactagtaaaaaaacaagtctaaatgataagaaatagaatataaaactatcatgagtcataattaaagatgatttgccaatcagtaaggtgttttaatggattaacatgccgcacaaaatggttatgggtgttcatcccaataagtgatgaaaaattaaacaggtgtaagtacgtcatctgtccggtaagccccctaagagccagattaagtgaagttaaacgaagactgccagttgtcaccggaacgatggcctctttgccagggcactgcattcagtcatctgtgcgcgttactctaactggcactcgaacgtcggcgacggggttaccggtggatcaggccgttcctgtggcgtaaacgtttttatgtcagtaccaacagatttaccacatttatcatcttaacagtttgagtgtaaatgcaggctgcgtcgcaaagggaggaaactgagtggcgtgttcagtctaaaagagggttgatgccagcatacaggggcgaagctggtcaacaagtcaacattaatataatggaatattcggagagaaacgtcaggcagttgaccttaaatgaacaggaagatacatccccaggaaaattaatgctggtgtaataaatacaccaacattaatccggtctgattattaatcagacaaatatcgttaattcgtcgaannnnaaatcaacgttttttcttacgaccctgaacggccttaaagcgtggattagatttacaaatcacatatagccgtccttttcgcttcacaatctgacagtctggatggcgttcttntgcggtacgcagagagttaaggactttcatcacgccccctttttcgtgctaacaaaacgaccaaaacgttgggtgaatcgtgcaacatttccttctgatgccactgttctcagcttccctgtatagaacgggtgcgatttcgaagagacatcaattgttacgtacggatacgttacgccatccagctcaatctcacggtctgttttgatagtcgagccgattttaaagtactcatcaacactggtgtcgtggaacaccacagtacgatactcaggatggatattgggcttcatcatttttacctgttatgttataacataaccacaaagatacatgctcatccggatcatttcaacacccaatccctgtgaccattagtggtatgtggaatttcctcaacggggaagtctggcattgttaacagccattggcgacgctcccataaacgcctggatgagtgattgatgatagtttcgctgagagtatggatttttcgagaatggaggttatctccactttactggccgatgatttatcgcagtatgattgattacctgacagcgtgtattcctctcccacggatataataattacttacaaaaagggagaggatgcatattttaaatatcactgaagtgaacagtttattgccgttattaatagaaatggaaaaataaataggcgtatnnnnnnnnnnnnnnnnaaacaacgatattaatcagtttatgactgatttgttgtactttattctctttcattggtacttcctcgctttaaaaaagagcgcacttcgtaagtgcccttatataaataacgagtttggtcaaccaattttttgacatgtatcacaaatttgaatagatgtattacatcaggcatcttttattgccccaacgtcattgatatatgtcgcctgaagtcagttccgggaatgagtctgatctcaagactggcccagtcctggcgttgattggcgctgaggagcatatcgcatctcatcataatgtcgtatctcctggggtgttatacaagatatcgttgttggtaacctgggcgaggaattgagctctattaaaccgtcaactatgccggatacatactagattacactgcaggcacgccttatgagagaacgtgccgcagtgacgggttaattatctgaaagaatttgtgaggctgtatcggttactcattgatttgatagttttactctcgggagagtaatagatatttaatccattaacggaaaccagccagttcctttcgatgcctgaatttgatcccatagtttatccggaatggttaattcaggaacaagttgtggattaagggttgtttgaatttcatggcctctacctgattcagctaaagtcacccattctggatttatcaccagccctttaccgatcgcaacaagtggcaggccagtggaaattgcttcttgagcctgagacggtgtgcgtattttacctgcagcgattaccggcactctgcctgcaatatgatttaaaatcaattcaatagttcgggggccatttggcgactcaacagggtagctatcgttaatactgaccagcgaggtatgtatatacgaaataccggatgaaatgagccgatcaaggagtttataagtatcctctatccgcagcccccctgttgcagattcttcaggagatattctgtaaccgatggcaaagggctttgtcgcatattcatagactacattttttacttcctgtaatacggccagcgggaagcgcatacgtccttcgagatctcctccccatcggtcattacgctggttaaatagaggggagaaaaaattctgtagaaggaatccgtgcgcaccatgaagttcaatgccatcaaaacctgctttaatcgccctttttgtgacatctccgaatgctctaatggtttcctgaatttcgttttcagtcatttccctgctttgtaccactctcttcataaagtcaccagattttacgcttgatgcgctggcactaataacatcgttatttggtacaagctccgggatggctttattaccggcgtggaaaatctgcaaaatagccggagcaccgccacttttggctgccgctgctaacttttcaaggctgttaatgaaacggtcgtcatacgcggcaaattcatgagtaaacccaatgccgcttggcgtgacataggtacatcctgttattactaaaccaacattttgtgagcgacgtttataaaattcgagttcttgctcagagatggttccatcaggattcgctgaccaggtcgtcataggagccataacgatacgattacgtagctttattttttctgtcagcataaaaggagaaaacaatgatgggtgtttatttgtcataacaatacctcaaatgtttatctgattttgatnnnnnatgttttaactggttagttgttgccagctttggaaccaagagttctggctttatttataatccctttaaagggtttctaataattgagttgctgcttttttgttttttaannaannnnnnnnnnnnnnaattttattattgttgtgtagtcaataaaggataaatgtcagggagataagggatctccctgtaaaattattacaaatgtgttttataaaaaggaattaatttatcgagtgcctgtttcacaggttctggcttatcatacaggtcgtaatgtgaataaccttcaaccacgaccagctctttatgttttgaagcagcgcggccaataatttcgcagccgtcacggtaggcaccaaatgcgcccactctatcgcccaccacaaccattattggttgagttaacagcacttctgcaagatgaaatgcatcccaacccacggcaacagtctgatgtgagaatagcgaacgatttaccccattaggtgcatagcctcgtggcgaacgataatattctgtggcttcaaaaaggtctatttctgttagtcccgcttcaagagctgcatccggagaagaggggagtaaatcatctacgcgaagttttgcgccgttagcttcgtctgttctttgttgcgccattgcttcaagtgctccgataggattaaacgctgtaaatccctcacgcataagacgcccgtagtttgcacccgtgacagtaccaatagctttaattcggcgttctgtcattgcggcattaatggcatatccacctccaccacaaatacccagtacaccaatacgcccggcatcaacgtaaggtaagctggtaaggtaatcaacgacaatgctgaagtcttttactcgcattgttggatcttccagataacgcggttccccaccgctgcttccctgaaaactagcatcaaaagcaatgacgataaagccagcttttgccagggcggcaccatacacactacccgatgtctgttctttgcagcttccaattggatgggcgctgataatggcaggatgctttttttcactattaaaatcgtcagggaaatagatatcagcagctatatcccagtaagtgtgttttatcgaaacagttttcatttcaagctccggggatttgcctaaacagatttaaatatcatttctattatccgcaactggcatttgtgttcatatcgagaacggcgtaatagtatgacttgtattggttatcatcaatggtctaatatctatcacagtgttaagttaaggtttacaatgatgaaaatagagccttcaattttgccttctcttgcctggtttgcgctgattgttcgtgccggcagtttttccagagccgcttctgaaatgggtattacgctggccgcattgtcccagaatttaaaatctcttgaggaacgtcttaacaccaagctgatataccgtacgacccgcaatatgtcgcttactgaggaaggacagcgtctgtatgaagtgctggtgtcggctttggggcaaattgatgatgctttgaaagatgttggtgatacccaacttgaacctacaggcctgttgagaataaattcctcccgtgttgcagcacggatgcttgttgagcctcatattggcgagtttcttactcgttaccccaaaacaaagatagaactcattatggatgacggtttatctaacattattgcggacggctgtgatgtgggcatacgtcttgagcaaggactggatgagcatatgactgccgttcctgtttctccgcttattaaactggttactgtggcatcgccagattatttaaaagaacacggtattcctgaaacgcctcaggaactgagtaaccataattgccttcggttgcggcataaaagtagcggtgcactctctgcatgggagttttctaaggttgtggggggtaatgaagagttcgaaatagaggtttcaggtaagtatatttctaatgatgacgaaagcatgatacgaatggcgctgaatggaacgggtatcattcaacatctggattttgcaatcgctgaacatatcaatgcgggcaagttacagccgattcttgaggattgggctgtttcatttcctgggttttatatttatgtttcatcacgggtgagaatgccctctaaagttcgtgcttttattgattttatggtggagaaaagagtaaaactcgaaaattgatgatatgtgtaattgatggttgctctgggcgaatatcggtaagaggaataacgtaatcattaggatgcgtttacataataaagtttctgataattaatacttattttctatacggccataatatcaattatcattatcaccagtaatgtggttaaaataatagtatctatgaccgctacggttaacggtggttattttgggaggcgttaacacgtagcggcttgtagttgtaagtcttgaacaggtacaaagcctgaaatcaggaggatatcgctatcaaacttcctttatttcttctcgcagtttcgcatcttatagaagaatcctgtatttccatcttccacgatgaagcgatcgttaaaagttggacgacgaataaatgtcactccacctattgttgctttttgttttataccatcatcaacattttccagatctggagagtacaattgatctccatttggcatttgaacgatgaaattgtttccattatcgagaactgttgcggattttgacagaatttgagtagcggtatccaggctggaaatcctaatgtcacaaacatatttgcctggccccagatcttcttctgcaaatacaggtaaggaaaataatgcaaatgcgaggatgagattcttattcatgcaaactccaggaagatcaataaaagcaatatgttacataaagagcacgtaaatgaaaagagcgattggttaatgagtaatgctattaatccccgcatggcctacttttcattggctgcggtgttgaacctcattgaatatgggcaagactctgactgagtgaccgacgtaaataggtagatgcataatcgcttaccgccctgtaactgcaaacggtgcccaggcttctggctgaataccacggctttgcatccacggaacggcgtgtagctgctgattgaaagggttaacttcaacctggtttaccgctggaacgacgttattaaaggcgataaggtcagccagtcggtcaggatggaagttactgacgccaatagcgcgaattttaccggcctgttgcagctcttccatggcacgccaggcaccgtggacatcaccgtaaggctgatgaatcaaatacaggtcaacgtaatcaagttgcagtcgattcagagagcgttcgaactgggctttggccccttcgtaactggtatcctgcaaccagagtttcgtggtgacaaagagttcgttacgggcgataccgctttgtttcagtgcgttcccgacctggggttcattttgataggaggcggcggtgtcaatcagtcgataaccggtgttaanagcgtcaatgaccgctctttcgcattcggcggcatcggtcatctgaaatacaccaaagcccagcaggggcatttcaataccgttattcagttttactttttgcatggtgttatccttccgttatcgttcatgagaagcataacgtaaagagaagagctcgattagacggcaggatttgtcaggggttatgaacgaaattcataaatctgtttgagtgttgcgatgggtagtgcaagttcgatatctccgcaatttacagtccgatgaaggaaaatgaatatccataaaaaatatatcggtttatcctggcgtatatacctacttcgacgtatttccaatagttgctaattaaaggcaggtcattattattcactctnnnnaatgaattattcactgtccgcagagtaagaaatataacttaagtatctatttaatgacttgcacaaaaagctaaattttcacccataaataaaaatataatcccgcgcccaaccacctgatgagtggctacaggcactggatatattaggtggcggtgtactttcttacataaaggtatttccttttctgcggaaaaggaaaccgggaaatccccggtttttctgacaagcagacgccattatttgtgtctgcctatgttcgttaattcgttcatcaggaaattatctcaatgtcacgttataaaacaggtcataaacaaccacgatttcgttattcagttctggcccgctgcgtggcgtgggcaaatatctctgttcaggttctttttccactcgctgtcacctttaccccagtaatggcggcacgtgcgcagcatgcggttcagccacggttgagcatgggaaatactacggtaactgctgataataacgtggagaaaaatgtcgcgtcgtttgccgcaaatgccgggacatttttaagcagtcagccagatagcgatgcgacacgtaattttattaccggaatggccaccgctaaagctaaccaggaaatacaggagtggctcgggaaatatggtacagcgcgcgtcaaactgaatgtcgataaagatttctcgctgaaggattcttcgctggaaatgctttatccgatttatgatacgccgacaaatatgttgttcactcagggggcaatacatcgtacagacgatcgtactcagtcaaatattggttttggctggcgtcatttttcaggaaatgactggatggcgggggtgaacacctttatcgaccatgatttatcccgtagtcatacccgcattggtgttggtgcggaatactggcgcgattatctgaaactgagcgccaatggttatattcgggcttctggctggaaaaaatcgccggatattgaggattatcaggaacacccggcgaatggttgggatatccgcgcagagggctatttacctgcctggccgcagcttggcgcaagcctgatgtatgaacagtattatggcgatgaagtcgggctgtttggtaaagataagcgccagaaagacccgcatgctatttctgccgaggtgacctatacgccagtgcctcttctgacactgagcgccgggcataagcagggcaagagcggtgagaatgacactcgctttggcctggaagttaactaccgaattggcgaacctttggcgaaacaactcgatacggatagcattcgcgagcgtcgggtactggcaggcagccgctatgacctggttgagcgtaataacaacatcgttcttgagtaccgcaaatctgaagtgatccgtattgctctgcctgagcgtattgaaggtaagggcggtcagacactttccctggggcttgtggtcagcaaagcaactcacggactgaaaaatgtgcagtgggaagcgccgtcattactggctgaaggtggcaaaattaccggtcagggtagtcagtggcaagtaacgctcccggcttatcgtccaggcaaagacaattattatgcgatttcagcagttgcctacgataacaaaggcaatacctcaaaacgcgtgcagacagaggtggtcattaccggagctggtatgagcgccgatcgcacggcgttaacgcttgacggtcagagccgtattcaaatgcttgctaacggtaatgagcaaaaaccgctggtgctgtctctgcgcgacgccgagggccagccagtcacgggcatgaaagatcagatcaagactgaactaactttcaaaccggctggaaatattgtgactcgttccctgaaggccactaaatcacaggcaaagccaacactgggtgagttcaccgaaactgaagcaggggtgtatcagtctgtctttactaccggaacgcagtcaggtgaggcaacgattactgttagcgttgatggcatgagcaaaaccgtcactgcagaactgcgggccacgatgatggatgtggcaaactccaccctgagcgctaacgagccgtcaggtgacgtggttgctgatggtcagcaagcctatacgttgacgttgactgcggtggactccgagggtaatccggtgacgggagaagccagccgcttgcgatttgttccgcaagacactaatggtgtaaccgttggtgccatttcggaaataaaaccaggcgtttacagcgccgcggtttcttcgacccgtgccggaaacgttgttgtgcgtgctttcagcgagcagtatcagctgggcacattacaacaaacgctgaagtttgttgccgggccgcttgatgcagcacattcgtccatcaccctgaatcctgataaaccggtggttggggggacagttacggcaatctggacggtaaaagatgcctatgacaaccctgtgaccagcctcacgccggaagcgccgtcattagcgggtgccgctgctgaaggttctacggcatcgggctggacaaataatggtgatgggacgtggactgcgcagattactctcggctctacggcgggtgaattagaagttatgccgaagctaaatggacagaatgcggcagcaaatgcggcaaaagtaaccgtggtggctgatgcgttatcttcaaaccagtcgaaagtctctgtcgcagaagatcacgtaaaagccggcgaaagcacaaccgtgacgctggtggcgaaagatgcgcatggcaacgctatcagtggtcttgcgttgtcggcaagtttgacggggaccgcctctgaaggggcgaccgtttccagttggaccgaaaaaggtaacggttcctatgttgctacgttgactacaggtggaaagacgggcgagcttcgcgtcatgcctctcttcaacggccagccagcagccaccgaagccgcgcagttgacggtcatcgccggagagatgtcatcagcgaactctacgcttgttgcggacaataaggctccgaccgtcaaaacgacgacggaactcaccttcaccgtgaaggatgcgtacgggaacccggtcaccgggctgaagccagatgcaccagtgtttagcggtgccgccagcacggggagtgagcgtccttcagcaggaaactggacagagaaaggtaatggggtctacgtgtcgaccttaacgctgggatctgccgcgggtcagttgtctgtgatgccgcgagtgaacggccaaaatgccgttgctcagccactggtgctgaacgttgcaggtgacgcatctaaggctgagattcgtgatatgacagtgaaggttaataaccaactggctaatggacagtctgctaaccagataaccctgaccgttgtggacacctatggtaacccgttgcaggggcaggaagttacgctgactttaccgcagggtgtgaccagcaagacggggaatacagtaacaactaatgcggcaggtaaagcggacattgagcttatgtcaacggttgcgggagaacacaatatttccgcttcggtgaatggtgctcagaagacggtcacggtgaaattcaacgcggatgccagcaccggtcaggcaaacctgcaggtagacgccgctgctcaaaaagtggcaaacggcaaagatgcctttacgctgacggcgaacgttgaggataaaaatggtaaccctgttccagggagcctggtgacctttaatctgccccggggtgtcaagccgcttacaggcgataatgtctgggtgaaagccaacgatgaggggaaagcagagttgcaggtggtttcagtgactgccggaacgtatgagatcacggcatcggcagggaatagccagccttcgaatacgcagactataacgtttgtagccgataaggctaccgcaaccgtctccggtattgaggtgattggcaactatgcactggcggacggcaatgccaaacagacgtataaagttacggtgactgatgccaataacaacctgttgaaagatagcgaagtgacgctgactgccagcccggcaaatttagttctgactcccaatgggacggcgaaaactaatgagcaaggacaggctattttcaccgccacgaccactgtcgcagcgaaatatacactcacggcgaaagtgagtcaggccgacggtcaggaatcgacgaaaactgccgaatctaaattcgtcgcggatgataaaaatgcagtactcaccgcatcatctgatgtgacttctctggtggcggatgggatatcgactgcgaagctggaggtgacactgatgtcggcaaataaccccgttggggggaatatgtgggtcgacattaagacgccagaaggggtgacggagaaggattatcagttcctgccgtcgaaaaatgaccatttcgtgagcggaaaaatcacgcgtacatttagtaccagcaagcctggtgtctatacgttcacatttaacgccctgacgtatggcgggtacgaaatgaagccagtgacggtgaccattaccgcggtggatgccgatacggcaaagggcgaggaggcgatgaactaatattaagaatatgaaagtaacattctaataaacaataatggcgttgacatcttcaacgccattatttattgaattgcctgacagtagtctcgttataagttcatttagatatagcgacagctaaaccggacgaacagggataaatatttcgcaaacaacatcattgctatccttttctacgaaatcttcattgtaataaaaccgctcaatatcactgccgttcactctggctaaccccctggcgggtaattccatcagatagaggtttcgcgcccattcagggtagtgctcccactcaccttcatagcggaaagaggcatacagtcctcggttaattgtccactctttcggcatctctgaatcggtttgtttgcataccgtaccggcaaaagtttcaactgtgagtaaatagaccgattttgttgacggttcaaacgtggagacgaaatagatatccgtcttaaaattcttcatacatctggctaaatgatgacgtcgcagtttgacttcttcatccggtgatttattcgacacttcaatatcatatttaaatgaattgccaaaaataggtgtctcaggaaagttgactaatctacactccgtcttttgctgttgacgtattaaaaaagaagggaagatatttgcgagatcccaataatcacggtggcggtatacacggggagagcagccgaataactttttaaattcgcggctgaatgactgctgtgaatcaaaatgcaaagagattgcaatatcaagcatagatttcgcggtgagccggacaagaatggcggcacgacaaagccttcgtttgcgaatgtattctcccaaaggcacatgcatgaaatttcggaacagaagctggatgttgcgtctgctgtagccagatttctgtgcgatatcttcgattgaaatagggtgctcaagattgcactcaatccactccaggagctgctgtagaatcttctgcctgatcatcacattctccgttaattctttgtcatatcgcacattttcgttatgccctgggccctaagtgtatcaaaaacagcaagggcgaaggcaaaagcactggtagcgtctgcttcgttgtccccgaaaatagagaggtttcagtcctacattattaatgaattttttgcataagtgatatcaaaatccacatactaatttgaggttacgttttaacgtagactcattgttcatgcctaatggagggactgacagtggaattttccgtattaagtaacaatctgaaaatgccgatgatgggatttggtgtttttcaggttaccgataaaaacgtgtgcaaacagtcagtgttgaacgctatccgcacggggtatcgactcatcgacactgcagcggtatacggtaatgaagatgccgtcggtgaagccgttcgtgaagctatatccgaaggtttatgtacccgagaagagttatttataacgtctaaattgtgggtgcaggatatgttgaatcaggatacggcagcagcaggtattgaagcatcattaaaaaaatcgggactagaatacttcgacctctatttattgcatcaggctatgcgcgattatttcagtgcgtggcgtgcactcgaagatgcctatgaagagggcaaattaaaagcgattggggtttccaatttctatcctcatgttctggcgaacttttgtgaaacggtaagagttaaaccgatggtcaaccaggtcgagttgcatccctattttgcccaaccagaggcgctggcaaccatgaagtattataacgtgcagcctgaagcatgggctccgttaggtggtggacgacataaaccctttgaaaataatctgcttcagagtattgcagatgcccatcaaaaatcgatttctcaagtcattctgcgttggaatattcaacggggagtggtcgttattccgaaatcgacacatcaacagcgtatcgaagaaaattttgctatctgggatttctcactgacagagaaagaaatggcacaaattagttcgcttgatttgggttatgttggggagtcggtaaaacattttaatcctgaatttgttcgtggttgtcttgctgtaaaaatacatgattgatattaatcatgtattttacctgagacgacaagaatcttttaacaggggagtgatattgatcttcactctgtcatatctccggtaatatggcgtcaggcttcatcatcagaaagggggcctgacgcctgaaaaagtgaacaacagacagtgttcggattatcaatattcagtttttaacgttgaactggattcattactgcgttgtttaagaatttcccgcgccgaatctgccattatcatgacagcacctgccagcatcagagtatctttcaataccagacgaccagcaccggataaataagggaaaccatgatgagcgtcacccaatgcgggtacccatgcctccggggtggtgattaaaaatgagagtgttaccagcggtgtggtaaatgccatcagccctcccaataaacctaaccagcgattgacaggattagccaaaaccagcagagcaataatcacctccacgacgccaagaccgttggaaaaaccataggtattattggccgattgccatgcccttgcttctggtttgtattcgccttcgtgagtcagatactgtttatagtcttccgggtgttcataaaagaacgacattagtggactgtttgcgacgaatggtgtaatgctgtctgcctcgtaagggacaaactttaataacccaatccacataaaaacaatcgcaatactcagacgaatcaatgtcaggccaattttatctccccgacttaacaggtgcaggtatttttccattgtgaacatccttatttatacaatactgctgttgcggttgaattattatcaattcgcatcgatgtgactttccaggatgaagcattatattttctggctatatcagcaatggcatcctccagaactgtcggtgatgctgatactgacgagacgctgatatgtttcagaattattttatcatctgcattggtggaaaatgccataacgccagataatagtgttgcaaataaaacgggttttttaaacatataaaataccatcaatgaagtgattaagaagttatagagtaacagggaattaataagattcttttctctgagacgccagaatatttgttctggcgtctgattttgagtttatttgactaatgaaaatagatcattgagtgattcgctcatcgacggatgagtaaatatctgatcgcgtaatatgctataaggcagcccggcatccatcaccattttcactatattaatcatctcgtgggagtcaacacacagcagtgatgcccctaatatacgttgggttttattatcaacaatcgcttttaataccccacgggtatcgttcatcactctggcgcgcggaattgcagctacaggcaatgtcaccacctgaatatcagcaccactctctctggcttgttcttctgtcataccaaccctggacaggggcggtgtcataaatacggaataaggcacatttttccgatcatcagtactacgtttgccttcacccagtaactcatcacgtacaatgcggtaatcatccagtgatatgtaagtaaattgcagcccgccggtaacatctcccatcgcccaaatattgtctgcggtggtatgtaatcgcttgtcaacgacaattgccccgcgctcgtttactgcgataccggcattttctggatgtaacgaagcggtagccggttgacgaccggaagctattaacagtgcatccaccgccagttgggcgtgctcgctatgcacttgcacttgattttcatggtgactgattcgctccacatgggcattgaggataatatcgacgccctgatcgcgtaaaatcgtcgcgatattatcagcaatatcccgttcttcccgaggcaaaaacagcgaagctgcttctaaaatggttaccttgctgccaaaattagcgaacatagaggcgaactcaacgccaatatatccgccgcccaaaatacctaaatgcccaggcaattcttttagattaagtaatccggtgctgtcatatactcctggcgtggtggtaattccaggaattggcggaaccacggtttgtgcaccggtattaataaaaattttctcgccatgaatttccagatttccctcaggccgatgaacacgcaggctatgattattgataaactccgcctggccgttgatcacgtcgatattgggcatatctgcaagattatgaaaattcttattacgtaaaaaattaaccacttcatttttacgctgtatggctcggacaaaatctgtgtgctgctgtgcgtcatgaaccaatgttttggttgggatgcagccgatattaatacaggtcccgccatacattgcatttgattgttcgatgagagccactcgccaacctgcttttgccagcgtgacggctaatgtttttccagccttgccaaaaccaataatcactgcctgatatttattcatgatgatttcctgtcgaaacgcgttcatttgacatcatgactatagacgcaaaagagcaaataacatttcttcacaacgcttgatattttgtcttatcgtctggtattttctttttcttaatcagaatcacaaaacaaaaatcatgattaactatttgatggtattagattagttgtttactaagattgttggtgtttgtaatcaaaaaccactcaggagtctgatatggatgcccttagccgtttgttgatgcttaacgctccacaaggaacgatcgataagaattgcgtgttaggaagtgactggcagcttccacatggtgccggggaattatcagttattcgttggcatgcgttaacgcaaggagcggcgaagctggaaatgccgacgggagagatttttacattacgcccgggaaatgtggtcctgctaccacaaaattcagctcatcgcctgagtcatgtcgataatgaatcgacctgtattgtctgtggtactcttcggctgcaacattcggcacgttattttttaacgtctttgccggaaacgctgtttttagcaccggttaaccacagcgtggaatataactggctgagggaggcgatcccgtttttacaacaggaatccagatcggcaatgccgggagtggatgcactgtgtagccagatctgcgctacattctttaccctcgcggtgcgtgagtggattgcacaggttaatactgagaaaaacattctcagtttgcttctgcatccacgtcttggtgcggtaatacagcaaatgctggaaatgccaggacacgcctggagcgtcgaatcgctggccagcatcgcccacatgtcccgggcaagttttgcccagcttttccgtgatgtttccggaaccacgccgctggctgtattaacaaagttgcgtctacaaatagcggcccagatgttttcccgggaaatgctccctgttgtggtgatcgctgagtcagtaggctatgccagtgaatcatcttttcacaaggcgtttgtccgcgagtttggttgtactccgggagaatatcgggaaagggtcagacagcttgcaccctgaataaaaccgccagaaatcagggcaaagataatccgcattccgggagttgtgagcctttcaactatttctatttccaacggtggtttgggctttatatatttttttctgatggactctagctcagtnnnnnnnaaaaaatgcaaactaaattgcttcaattaaataanatnnnnnnnattacttgatacgtgattattgtcggtgatttttttgtataccatcagtgtatatctcaataacccctgaataannnnnnnnnnnnnngtataagggatgtagccatttttaaatggatttcttatgccaaaaatgatcgtcgatttcccnntaaaannngagcgatgccgaaannnnnnnnnnnnnntattgcatttgaagtttggatgaaagattatcatttgtcatacaaannaggggtggtatgttgctagccaattnnaaaagaacgccatatttattgatgattgatccccgnnnnnnnnnnnnnnnnnnnnnnnnnnnnnnnnnnnnnnnnnnnnnnnnnnnnnnnnnnnnnnnnnnnnntnnnncaattaaataaaatcccgactattactnnnnnnnnnnnnnnnntcngtganntttttgtataccatcagtgtatatctcaataacccctgaataagtagctcnnnnnnnnnnnnnnnnatgtagccatttttaaatggatttcttatgccnnaaatgatcgtcgnnnnnnnnnnnnnnnnnnnnnnatgccgaaagaaataaaattagttattgcatttgaannnnnnnnnnnnnnnnnnnnnnnnnnnnncaaataaggggtggtatgttgctagccanntaaaanagaacgccatatttattgatgattgatccccgggtggggggaaacatcgggaataaatgggcatgaagtaatggagtattagttgtgaatgtcaatttctttgtcacctgtattggtgacgccctgaaatcaagaatggcacgagactccgtgctgctactggaaaaactcggctgtcgcgtaaatttcccggagaaacagggatgctgcggtcagcctgcgatcaatagtggttatatcaaagaagcgattccagggatgaaaaatctgatcgccgcactggaggataacgacgatcccattatttcaccggctggctcttgcacctatgccgtaaaaagttacccgacgtatctggcggatgaacctgaatgggcatcacgagccgaaaaggttgccgcgcgtatgcaggatctcacctcttttattgttaataaattaggggtagtcgatgtaggtgccagtttgcaagggagagcggtgtatcacccatcttgtagcctggcccgtaagctgggggtgaaggacgagccacttacgctgctgaaaaatgtgcgtagactggagctgttgacctttgctgaacaggatacctgctgcggatttggcggcacgttctcggtcaaaatggccgaaatatccggcgagatggtgaaagaaaaggttgcgcacctgatggaagtccgccctgagtatttaattggtgctgacgtgagttgcctgctgaacatcagtgggcgattacaacgggaagggcagaaagtcaaagtgatgcatattgctgaagtgttgatgagccgctgaggatataaagatgttgatcaaaaccagtaatacagattttaagacacgcatccgtcagcaaattgaagatccgatcatgcgcaaagcggtggcaaacgcgcagcagcgtattggggcaaatcggcaaaaaatggtcgatgaattggggctctgggaggagtggcgcgatcgggccgcccagatacgtgatcatgttctgagtaatctcgacgcttatctgtaccagctctcagaaaaagtgacgcaaaacggcggtcacgtctattttgcaaaaaccaaagaagacgctacccgctacattttacaggttgcccaacgcaaaaatgcccggaaggtggtgaaatctaaatcgatggtgaccgaagagattggtgtcaatcatgtgttgcaggatgctggcattcaggtgattgaaaccgatttgggtgaatatattctccagctggatcaagatccgccctctcatgttgtggtcccggcaattcataaagatcgccatcagatccgtcgagtgctacacgaacgtctgggctatgaggggccggaaacgcctgaagcgatgaccttattcatccggcaaaaaatccgcgaagatttcctcagtgctgaaataggtattacgggctgtaatttcgcggtggcagagacaggttcggtatgcctggtgaccaatgaaggtaatgcgcgaatgtgtaccacgctgcctaaaacgcatattgcagtgatgggaatggagcgtattgcccccacgtttgccgaggtagatgtattgatcaccatgctggcgcgcagtgccgttggtgcacgtttgacgggatacaacacctggctgacaggacctcgcgaagcggggcacgttgatggtcctgaagagtttcatctggttattgtcgataacgggcgttctgaggtgctggcctctgaatttcgggatgtgctgcgctgtattcgctgcggggcttgtatgaatacttgtccggcatatcgccatattggcggtcatggatatggctctatttatccagggccaattggtgcggtgatttctccgctacttggcggctataaagattttaaagatttaccctacgcctgctctttatgcacagcttgtgacaacgtgtgtccggtgcgtattccgctgtcaaaactgattttgcgtcatcgtcgggtgatggctgaaaaagggatcaccgcaaaagcagagcaacgggcgataaaaatgttcgcttatgccaatagtcatccaggattgtggaaagtcgggatgatggccggtgctcatgcggcaagctggtttatcaatggcggcaaaacaccactcaaatttggcgcgattagcgactggatggaagcacgcgatcttcctgaagctgacggagagagtttccgtagttggtttaagaaacatcaggcgcaggagaaaaagaatggataatcgaggcgaatttttgaataacgttgctcaggcactgggtcgcccgctgcgacttgaaccgcaagcagaagatgcgccgcttaataactatgctaacgagcggcttacccaacttaaccaacagcagcgctgtgacgcgtttattcagtttgccagcgatgttatgttgacgcgctgtgagctgaccagcgaggcgaaggcggcagaagctgcaatacgtctgtgtaaagagctgggagatcagtcggtcgtgattagcggtgacacgaggctggaggaattagggattagcgaacgtttgcagcaggaatgcaatgccgttgtttgggatccggcgaaaggtgccaagaatatctcgcaggcagagcaggctaaagtgggtgtcgtgtatgctgaatatggtttaaccgaatcgggaggcgtggttcttttttccgccgccgagcgtgggcgttcattgagcctgctcccggaatcatctctttttatcctgcgtaaaagcactatcctgccgcgtgtagcgcaactcgcagaaagattgcatcagaaagcgcaggccggtgaacgcatgccgtcatgtattaacatcatcagtggtcccagctcaacggcggacattgagcttatcaaagtcgtcggggttcatggtccggtgaaagcggtgtatctgattattgaggattgctgagagaggtatgaagtctggacataaacctgaagaaggcatacgaggttgaaaatagcgttaaggacaacctgacttaaccccgttccgtcatggttatgctcctcttctgtaaatatcctggcattactaatgccaggatatttacagtgaaaaagacaggcatccattcctgaaaacgggttcccttcccggtcattgtcacttcagctttatacaggcactctctatcagaatgctgtttattactgcccagagttttgttggtattcatctaccatttttttgacaagacaaaacattacagaaattacaatgcttagaaaaaatcccagagccaggcaaatggcagcagggtatttattttttatttctggtgagcttatagttacacagccatcaccgttcggatacaatgaccagttcctggtcaggtatatcatttttgtataaagctcactgttaattgctgaaggcgtttgtatctcatcgagaacttacctgccattatggtattctgacgcataccatttgataatagacgcctgcacgcgagatatttccgcttcagcagttggtaaatctctcttatctcctgaccattccagctttatttctctgttcttgacatctgggctggtgtgaaaaaatgtagtaattcgctgaataacatcttcagtcattgtggtctgacaggcaaagttattattgctatcacagttaacaagtatgccgggtgttgtctgatttatttttaggctgtaactcacttttatattatctttattgatatacagaaataaaagcaccattgccatacagatagctataataaaaaggataacaagaatctttttcttcagataaaataaaatctcaatcagatcgatatcctgtttgatttgttcactcataatatatccagaaaataaaatctgccgcagataaatgaattaatagtctatatcaggaatgttcgggttaaatatcagcaaaaagccagcatcatgaatactggatatttatagcctgcaggcagcatactgctgcctgcagggggtataacagtcgacaggggaaccgactgctttattcttaccaggtcacattgataccaactacaccctgtagcggattctcaatgtcgtcacctttggtgtagtcaaggcttgcatatgctcccatgtttttggtgatatcagcctgtacacctgcacccacgcggaatgctgcaccgtcaatgctggcattgacagactcatcacccagacggactttgttgccatcagagaattcgttcagtgcggccagattcagataaggtttaacgctcgcgttgcccacagcgaagtcataacccacgcgcgtaccggcctcacccaacacagagttatagctgtcagaatgaacgtccacgccgttgagctgataatccacaccttccagagtcagcgcagacagtttggcatatggctgaataaacaggccattaccgtcttcctaggtgtaaccgcctttaaccatcgcaccgaaaccattggtgttaaagtcagctttgatggtaccgccaccattcatcaggcgaacatctgccgtgttgctgtagtgaccaaactgtgcagcagtatcaatgaagataccgttgttatactggcggctcaggtaagcgtggaagctgtaaccttcagtgtcgcctttgctctgcatggtggtcatgtcacctttcgcagaagacatcgccacaccggccagccagctaccatcttcagtcatgaagcgggtatcaccacccagcattacaccgtttacatccaggtcataggatgcatttcccgcggtggtatgtttctgtttaccaccaaagtactgaatccatacgccncccttgtcattttcgctcagacggacagcatcctgacgggctgagagcgtgtcagcctgcagattagcaacgttagccggagctgctgccattgcctgaatcacggagctggcgttggatgctttatgcgtgttttttacgaaataaaagttaccatcagctccctgtgtcaggtcatattgatacagaccaccttccgttgtgcctgtggcttttagagtgctgtctttgccggtagaaataaatgccgtttgttcattgataagatccaatgaacccgcactgtaaacacgcaagtcaccgctcgctttaccgctgatatccagagtgttttcagaagaggcatcaacaatcagagtgccgttttgagaagcaaacgtgccagtattgactgtagccttcgtgatattaaccgtactgtcttttactgccagagcatcaacagttgaggatcccgtaacattccagacagactcgttttgcagagatacactggcatttcctgcccctgaaactttgcctttccagactgaactatcggaaagatttatatccagattactacccgctttatcgccgctattgaaagtataagcattaccttcccagtaagagcgggcaacgttcatgtttacatttgttgtggtagcggctgaattctcgctttcagaaagggccaggacatcagagtagatggttgaatcagcaacagacaaatttaaattttgcgttgctgaacctgtgccttgtgccgaagcagaggcataaattgtttgtttattattagccgccccaattactgagccatccttaatattcaggttgactgtatgaattcccgtcttattcccggcagtaactattgtttcaatccgaccattaataatatttgagccagcaagggtaatgttgtcggttgcatcaccttcaaaactattcaataagctacccttttgagcaaaaattgccgtggaggcgttgctggaactcttattaccttgagcatttatggttgtgccattaagcgtgacattatttcccttggccccttccagagatatccctgtcgcactacctttttcattttttgcaacgaaattaccgccattaacaacaacatcgccagttgaatcaatgaccattgcagtccggacataggtgccttcaccttgagctgtgatggtggagtctgtagcattaatcacaacatttttgttaccactaacttttacaccttcaacgaattttttgtctgccgttgattcagcagtaatatcatgaccagcaaaagcaacattaaggtcttcatctgccgcattaattgttacggctgtaatctgtttgtctgctgtattgctaataacaacatcttgatccagagtcgtcttatctttattcagcgtaaccgaatcagttgataccgcgttatcagcagcgaatgctggtgcagaaagagccataacaatagctgtcgctaatgcgctgcggtaaaatgccttactgtttttcatgaagaaattctccattctggtaactaatttcaatttcccacttatttatatttatgcagagataaaacctgcgtccctgcatttaccaccacggaatacctgttggtatttccgttttcacgcaatgtcatggcattcgttttttccaatgcatttccatcaccgtgaaatttattgctgctcagcagcagggcttcccgcaatgacatgctgtccggtattccccaacgcttttttagcgactgctcggcaagccatatctgtcttatccccgttttgagaaactgcgcactgtattcccagctgtgtccggcaagaagcaacgacaacaccttcttttgcttttccgggaagcgttctgacatgacgattgtctttgtgcggttattcacctctttcataaagacagagtaactgtccataactggcaaattttctgcatgtttcagccctgataacccaccagaggaatttgcaatactgatgacatgctctactgacattcctggtttcagtaacctcaggtttttgagaacgccagaaatactcacatccggtggcagaaaaaatggcgcgacgcacaacaccaccncgaatgagtgatcccgataaaatcggaaccacatttcagcgcattcggcaggtcgccctgccgatatcacgacactctgtggcctgtgccgcaatttattgcgtaactcctcttctgttccgatgcaggtaacattgccgacagaaccggttgatagagctgcgaactgcgctggtacaattcctgagggacagaaaagaacgaaacgcatccttccctcacagatgtcagtacgccagcacgnnnnacaggctgtacagcgnnnntcccaatcctgcagcccagagcagtagaaatattttggcccctacactgtagcgagtccgtacgcgccgcagtggggggtagtaacaacgctgttgtgtcataacaatcctggtctttttttagaaatattttttctttgtccgggaagtacttttccggaaatggcgtcagaatttattgattcaccaacggcaactttctctggataaagaattccggataccatgttctgcacatactgagtgagtcgatgagcggaatgttgtccgacatatcttgcatgtagccgtatattccgtttcactctgctgtcaccgcatcccgtatagagcagcctgaaatcgctcagagttcccagtccaagtttcattaatgcccgtgtggcaatcgcatgcagggtctttgaactgcgttgttcataacgggcaatctcactgaaactcatgccctgcatcagaatcttaagcacgctcaactcccgtgcagtcaggagccagaaatcgctcatatcgccgggcaaaggacgtagtaaccagcggataatttgattctgataacgactcgctgtcagcatggtgccgatgcgtgggaagccgttatacagacttgcagcaggagcattatcgaaccagtcggagtcaccggtcaggcagacctgccattgcccggcatcactccgcaagcggacaagacaagccagaagaactaactcccccgaaggaagcgaagggatatcagccaacagatagccacaggaggtctttaaaacgaattcaacctctgtagtgacgttgctgtacacccgcacgatatacctgtccgctgggatgagagactccagtgccagcctggtaaactgacaggcactgataataaccagaggcttcttcattcagactcgtccacgccatagctacaaaacctgacattttgattcaaaatgtcaggtttggtttaattgcctgaatatttaattttcttggaatataaatctaatttgtttgatttttattgtttttaatttggttgcatttaacaacatgagtgaaagttaatcactggtatgaccttggcggttaatcatttcaaatcatggggttattttactttagcgagaaatatcaacatgttatgtgttttattgaattgaatgggctgtttttttatggaagaattgaggaaaacgtaggaatctgacattttgaatcagaaggtactgttttaaagaggcttttttttccacacccctttaaatcgagcagcattactggctgtgtatctgacagtatgctggatatttcgatgacccagataatcctgaagtagtcgggtatcgacaccattgtcagccagagcaaaaccacaggcatgacgtaacatatgaggatgtgcttttacagctaatcctgcacgtcttccagcctcacgaatgatagaaaaaaatgttgtctgctgatagggcggcgtttccgggagagaaaaagccagtctccttcaactccgttttcaattaacttcctctgcttaagccacaacttgatcaaattatattcatcaggaagaagaggatgtgttgtcgagaaaccatttttaatccgccgaatattaagttgttttcctgatgcatcaatatcggataaacgtaaatcaagaagttcactggccctaaaaccgtgaatgaaagccatcataattagacagcgatttctttcaggaaaggacatgctctgggctgcatccatcagcctgtagacttcatcctgtgtgagatattttctcgtcatacgccaccgtgtacagttgtaaaaaagagaggcacacccagataagtatgcctgcaatcagaacgttatcgatgtaatctcattatctcattaataagattttttgaatagtagttctacgcaatagactaaatatgaactatttattgtgctgcttttctacaagccatttttaatgcgtgtttttatctacattgatgtgaaaaaataaatataaaagctatgaattacagggcgtgggggatgtgtgttacgtctaatgttttagtgatgtttagtagttttgagatatttgacgttatttcttataaggttgtttttattattcatcttattgattttatatgcattttgtcgttcaatgaagttattgtgtacnnannaaaaatttaatattgttcccgttaatttacaataacacattgttgtaagatattttttagtcgtaagtaaatcattactgatgggttctgctaatanattaaagattttctcttaaatagtttttttttgctttttttgtaaatatcaatttgtttatttttgattcatttgctggagagtatttcaacaatttttattttttttgcataaacttattaacaactttttattatcaattggaaatcaatgtaagctaaaatgttagcgaagcgataactttgtgctaaaaaatatttaagcatgatgattaattaaagaagagtaaaaataaatcactgctaataaattatacgaattgtgtttaaagctccacgttgttttggtctgacttatttttgtcctcgttacaagaacccttttcgtatatgctaaccgtgagcgggagtgaacaagtcaccatagccaggaacactagcggcgtaattcttaagctgagtggcatttcacctgcggtttatcagtgcattcatagtaccttcatcagcgagattgaacgagtcagcttagaatttgctggcgaggttgtcactatgaagcatgagagttacccctatgttttatataacgattctgtccccatacctggaacggtaactctcaatctgatcggttcctgagtcagttcaaatcacgactcatttttttcgctcttactggcatcccatttgccacaaaatatcccgccgtgctcctcggcaacgcttccttcccgcgaatcatatccgccattttctcgccaatcataatcgtcgtggcgttcaaattcccggtgataatctgnggcataattgacgcatccaccacgcgcaggccttccagcccatgcacgcggccttcgccgtcaaccacggacatctcgtcgtagcccattttgcaggtaccgcacggatggaaggcggtttcggcgtggttacgcacaaactcatcgagctgctcatccgtctgacattccgtgccggggctgatttcgcggccacgatactgatccagcgcgggttgatgcatgatctcgcgggtgatgcgaattgcgtcgcggaattcctgccagtcctgttcgtgcgacatgtagttaaacagaattgccggatgctggtgcgggtcgcgggatttaatccgcacatgcccacggcttggcgagcgcatcgagccgacgtggcactggaagccgtgctctttcactgcattcgagccgttatagttaatcgctaccggcaggaagtgatactgaatattcggccacgcaaattcctctcggctgcgaataaatccgcctgcttcaaagtggttgctggcaccaacgccggtgccgccaaacagccactccgcaccgattttcggctgattccaccactgcagggcagggtagagggaaaccggttctttgcactcatattgcagatacatctccagatgatcctgaagattttcaccgacgccgggtaaatcatgcaccagcggaatatcaaactcggccaacagttcagcgttgccgacgccagagcgttgcaggatctgcggtgaggcaatcgcgcctgcacataacagcacttctttgttcgccgtcgcgcgggtcggaatggtgctgtcgccttccagccactcgacgcccaccgcgcgtttacagtcaaaaataatgtgatcggtcatggcgtgagtacgaatggttaggtttgggcgcgatttggcctgatcgagataaccgcgcgcggtgctggcgcggcggccctgcggcgtgacggtgcgatccatcgggccgaaaccttcctgctgataaccgttgagatcgtccgtgcgcgggtagcccgcctgcacgcccgcttcaatcatcgcttcaaacagcggattgacgccgggtttggaggtggtgacgctcaccgggccgtcgccgccgtggtagtcgttctcgcccacgtcgcgggtctcggccttgcggtagtagggcaggcaatcgagataactccagttctccagaccgggttcttttgcccagttgtcgagatccatcgcgttgccacggatatagcacatgccgttgatcagcgacgatccacccaggcctttaccgcgtccgcactccatgcgacggttattcataaacggttcaggttccgtctcgtaagcccagttgtagcgtttaccctgtagcgggaatgccagggcagcgggcatctgggtgcggaagtcaaagcgatagtccgggccgcccgcttcaagcagcagcacggaggtattcggatcttcagtcagacgggtagcgagaacgttgccggctgagccggcaccaataatgatgtagtcaaattgcaaataaacctcctggttagaatatggactggaatttagccatctcaacctggatggacttcacctgggtgtaactctggagcgtcatcacgccgttctcgcggccaataccggagtgtttgtagccgccaacgggcatctctgccggggattcgccccaggtgttgatccagcaaatacccgcttccagctgatgaatgacgcgatgcgcgcggttcaggtccgccgtcacgatacccgccgccaggccgtagtcggtatcattggcgcggcgaatgacttcgtcttccgactcgtaggtcagaatggacatcaccggcccgaagatctcttcacgcacgatggtcatctcgtcgctgcaatcggtgaacacggtcggtgcaacccatgcgccgttatcgaggccatcgcctttcagtacatcgccgccgcacagtacgcgcgcgccttcctctttgcctttggcgatatagcgcagcacgttatcgcgatgcgggaagctgaccagcgggccgaagttagtttgcggatcgaaaacntcnccnnnncgaatgcgctcaacgcgcgccagaattttctgctcaaatgcggcgttgcatttcgccggaacgaagacgcgggtgccattggtacacacctgaccggagctgaagaagtttgccatcatggcgatatcggcggcgagatcgagatccgcatcgtcgaaaacgatcagcggtgatttaccgcccagttccatggtcacttctttcagggaagaggctgccgagttagccatcacttttttgccgctggcgacgccgccggtaaacgacactttggcaatgcccggatgctcggtcagatattgcccggtctccgcgcccacgcccggcaacacgttaaatacaccgtccggcaggcccgcttcgctgtaaatttcagccagctttaacgcggtaagcggagtgacttcgctcggtttgaaaatcatcgcattacccgccgccagcgccggggcggatttccacagggcaatctggatcgggtagttccatgcgccaatccctgccaccacgcccagcggttcgcggcgagtgtagacaaatgatgtctcacgcaacgggatctggctgccttccagcgacgggatcagcccggcgtagtactccagcacgtccgcaccggtaacgatatcgacggttgaggtttccgaatacgcttttccggcgtcgagggtttccagtttggcgagttcatcattgcgctcgcgcagaatatcgacggcccgacgcagaatacgcgagcgttccatagcggtcatcgccgcccagattttttgcccctgttgggcactcttcacggcgcgatcgacatcctcgcgcccggcggcctgcacggtcgccagcacgttaccgttggccgggttaatggtctcgaaggtgcgaccgctggtggnggaggtataaccaccatgtatataaagctgctgttctgccattcgggacatcacgtctcctcggttaatcggtgggtaaatgctgagtaataaagtgacgggtcagcgagtgtgcgagaggtttatccagcggtttgccgctcagtgccgcgcgcagccataacccgtcaatcagcgcggcaaggccgtagcccgcttcctgtgcctggtggcgcggcaattcgcggcgaaactcgctcaccagattcgacagcaagcggcggctgctgacctgctgtaaacgatagagcatcggctgatgcatactgctggcccagaacgccagccaggctttcatcgccgcactgctcacctgcgtttcatcgaagtttccgccaacaatcgcctgtaatcgctgctctgcactgccctgcggaagtgcatgtaatcgattcaaaaccgcgtcacgcagctgactggtgatatcgcgcatggttgcttccagcagaccatttttgtccctgaaatagtggctgatgatccccgtagaaacgcctgcacggcgggcgatctgcgcgatcgttgcatcgtgcatgcccacttcatttattgcttccagtgtggcgtcgatcagttgtctgcgccggatcgactgcatccccaatttgggcattttcgccactccattcatcagcgttgtttatctattaaagcggttattgattggacgttcaatataaaatgtgtcttaattgttacgaatttgattttaaatggtaacaataacagtggggatactggatgacagacctttcacacagcagggaaaaggacaaaatcaatccggtggtgttttacacctccgccggactgattttgttgttttccctgacaacgatcctgtttcgcgacttctcggccctgtggattggccgcacgctggactgggtttctaaaaccttcggttggtactatctgctggcggcaacgctctatattgtctttgtggtctgtatcgcttgttcgcgttttggttcggtgaagctcgggccagaacaatccaaaccggaattcagcctgctgagttgggcggcgatgctgtttgctgccgggatcggtatcgatctgatgttcttttccgtagccgaaccggtaacgcagtatatgcagccgccggaaggcgcgggacagacgattgaggccgcgcgtcaggcgatggtctggacgctgtttcactacggcttaaccggctggtcgatgtatgcgctgatgggcatggcgctcggatactttagctatcgttataatttgccgctcaccatccgctcggcgctgtacccgatcttcggtaaacggattaacgggccgataggtcactcagtggatattgcagcggtgatcggcactatcttcggtattgccactacgctcggtatcggtgtggtgcagcttaactatggcttgagcgtactgtttgatattcccgattcgatggcggcaaaagcggcactgatcgccttgtcggtgataatcgccactatctcggtgacatccggtgtcgataagggcattcgcgtgttatcggagcttaatgtcgcgctggcgctgggattgatcctgttcgtgttgtttatgggcgacacttcgttcctgcttaatgcactggtgctgaatgttggcgactatgtgaatcgctttatgggcatgacgctcaacagttttgccttcgaccgcccggttgagtggatgaataactggacgctcttcttctgggcatggtgggtggcatggtcgccgtttgtcggcttgttcctggcgcgtatctcgcgtgggcgtaccattcgccagttcgtgctgggcacgttgattattccgtttaccttcacgctgttatggctctcggtgttcggcaatagcgcgctgtatgaaatcatccacggcggcgcggcatttgccgaggaagcgatggtccatccggagcgcggcttctacagcctgctggcgcagtatccggcgtttacctttagcgcctccgtcgccaccattactggcctgctgttttatgtgacctcggcggactccggggcgctggtgctggggaatttcacctcgcagcttaaagatatcaacagcgacgcccccggctggctgcgcgtcttctggtcggtggcgattggcctgctgacgctcggcatgctgatgaccaacgggatatccgcgctgcaaaacaccacggtgattatggggctgccgttcagctttgtgatcttcttcgtgatggcggggttgtataaatctctgaaggtagaagattaccgccgtgaaagtgccaaccgcgataccgcaccgcgaccgctggggcttcaggatcgcctgagctggaaaaaacgtctctcgcgcctgatgaattatccgggcacgcgttacactaaacagatgatggagacggtctgttacccggcaatggaagaagtggcgcaggagttgcggttgcgcggcgcgtacgtggagctaaaaagcctgccgccggaagagggacaacagttggggcatctggatttgttggtgcatatgggcgaagagcaaaactttgtctatcagatttggccgcagcaatactcggtgccgggctttacctaccgcgcacgtagcgggaaatcgacctactaccggctggaaaccttcctgttagaaggcagccagggcaacgacctgatggactacagcaaagagcaggtgatcaccgatattcttgaccagtacgagcggcaccttaactttattcatctccatcgtgaagcgccgggccatagcgtgatgttcccggacgcgtgattgttattgcataaaaccgcgccatgtctgcatatggcgcgggaatcattgactcgctgtaaaaaattatgcatanattatatatgattgtcatgtcatatcctgaaattcctcttgtatcacttcatgattttatattttattaattaacgattttattttgtattagctgaatggattcagtcctatagggttatatatttattaataagacgattcttatatttggatacctaataagagttaccacttttaccggctgtatattaaatgtatttctcctgcttttgtttatattttgagttgatttgagttcccggatacatataatgcgcaggtattagagactgggggggnatgtaatgataaagttaagagtgttaacttaaaataagtttttagtagtaacttgctattttattaccctctgaactacatactcagatatgtggttgccaatgctatgcaaaatttttgaatttttatatgcgatgaacagtaaccggaatggcatttaatgcgttgctgtttatgcaatcttggttttatttggatgtattgctggagattgtgatgaataaaatatatcggctaaagtggaacaggtcccgtaactgttggagcgtctgctcggagctggggagcagagtaaaaggaaaaaagtcccgggctgttttaattagcgcgataagtttatattcatctctggtattcgccgatgatgtcatcgtaaaccaggataaaactattgattttggcaaagagaaccagagcatcgattaccgtattacggtgacagacaatgccaatctggtaatcaatgcgacagatacttcccgtccgcgtctgactctcgcttctggtggtgggttggatattaccggaggaaaggtaacaatcaatggcccacttaactttttgctgaaaggtacggggttcctgaatgtctccaatgctggcagcgagttatatgctgatgatttgtatgaatcaaactcaggcatgagacacgatcgcggctattttaatgtctccaacggcggcaaaatccatgttaagggcaccagccgtctgacctatttgcagggaaatgtcagtggtgaaggtagccaggtaaattccgaaaccttctttatgggcgtttacggcagttacggtggtaatcagtacctgtcagttaataacggcggtgaagttaatgccaggaagcaaattagcctgggctattatgatcaagtctccgatacaacacttgctgtttcggaaggtggtaaaatttctgcncctactattagtttaagcaccaactctgagttagcgttaggggcacaggaaggaagcgcagcgaaggcagcagggattattgatgccgaaaaaattgagtttgtgtgggcaaagacatccgagaagaaaatcaccttaaaccacacggataaagacgcgactatttccgcggatattgtcagtggcagcgagggcctgggctatatcaatgcgctcaatggcacgacttacttaaccggtgataactctgcctttagtggtaaagtcaaaattgagcaaaatggcgctttagggatcacccaaaatataggtacagcagagatcaacaaccgcgggaaattacacctgaaggctgacgatagcatgacctttgccaataagatctctggcaacggtacaataagtatcgacagtgggacggtggagttgaccggcaataactatgcattcagcggatatattgatgttgcttctggtgctgtcgctgttatttctgaagacaagaatatcggtcgtgcagagctggatgtcgatggcaaattgcaaattaatgccaacaaagattgggtatttgataacgatcttgaaggtagaggcattgttgaaataaacatggggaatcacgaattctccttcgatgagtttgcttatacagactggttccagggttcactggcgttccagaacacgacatttaatctggaaaagaatgctgagtttctgcagaaaggcgggatcactgcgggtcagggaagcctggtaacagtgggtaagggcgctcactccattagcactttgggattctccggcggaaccgttgattttggtgccctgacagcaggtgcacagatgacagaagggacggtcaacgttagtaaaacgctggatttgcgcggcgagggtgtgattcaggtttctgacagtgacgttgtccgctcagtatctcgtgatattgactctgcgttatcgctcactgaagtcgatgatggtaacagcaccattaagttggttgatgcgcaaggtgcggaagttctgggcgatgcgggcaatctgcaattgcaggataaaaatgggcaaatcctctccagcagcgcccaacgtgatattcagcagaatgggcaaaaagcggccgtcggcacttacgactatcgtctgacgagtggggtaaacaatgacggtctgtatattggttacggcctgacccagcttgatttacacgctaccgacagcgatgctctggtgctgagctctaacggtaaaagcgagaatgccgccgatctcagcgcaaagattaccggcagtggtgacctggcattcagcagccagaagggtcagaccgtatcgctttctaacaaagacaacgactataccggtgttaccgatctgcgcagtgggacgcttttgttgaataacgataacgtgttgggtaatacccatgaactgcgtctggcggcagagactgaactggacatgaatggtcacagccagaccgtgggcacgctcaatggcagcgccgattcactgctgagcttaaatggcggcagtctgacggttaccaacgggggcacttcaaccggttcgttaacggggagcggagagctgaatattcagggcggcacgctggacatcgcgggcgataacagcaacctgacggcgaatgtgaacattgctaattcggctaatgtcctggtaagtcatgcgcagggattgggtagcgcaaacgttgagaacaacggtaccctggcgttgaataatagcgctgaaaaaagagcggctgcgtctgtgaattacgccctgggcggcaatctgaccaacaacggtacgctgatgaccggaatgtcaggacagcaagctggcaatgtgttagtggtgaaggggaactaccacggtaataacggtcaactagtaatgaatacggtactgaatggcgatgactcagtaaccgataaattggttgtcgagggcgatactagcggcacgactgccgttacggtgaataacgctggcggtacaggtgcgaaaacccttaacggtatcgaacttatccatgtagacggtaagtctgagggcgaatttgttcaggctgggcgtatcgttgcgggggcgtatgactacactctcgcgcgtggacaaggggcaaatagtggtaactggtatctgaccagcggcagtgattctcctgaactgcagccggagccagacccgatgccgaatccagagccaaacccgaatccagagccgaaccctaacccgacacctacgccgggtccggatctgaatgtggataatgacctgcgaccggaggcgggtagctacattgcgaaccttgcagcagcgaataccatgttcaccacgcgtctgcatgagcgtctgggtaatacgtactataccgacatggtgacgggtgagcagaaacaaaccactatgtggatgcgccatgaaggtggtcataataaatggcgtgatggcagcggccagctgaaaacccaaagcaatcgctatgttctgcaactgggaggcgatgtcgcgcagtggagccaaaacggcagcgaccgctggcatgttggggtcatggcgggatatggcaacagcgacagcaaaaccatttcctcgcgaaccggttatcgtgcaaaagcgagtgtgaacggatatagcacaggcctctatgccacctggtatgccgatgacgagtcgcgtaatggcgcgtatctcgacagttgggcgcagtacagctggtttgataacacagtgaaaggggatgacttacaaagtgaatcctataaatcaaaaggatttaccgcttcactggaagctggatacaaacacaaattagctgaatttaatggcagccagggaacgcgtaatgaatggtatgttcagccgcaagcacaggttacctggatgggagtcaaagccgataagcaccgcgaaagcaacggaaccctcgttcatagcaacggtgatggcaatgttcaaacccgacttggcgtaaaaacctggctgaagagccaccataaaatggatgacggtaaatcccgcgagttccagccgtttgtagaagtgaactggctacataacagtaaggatttcagcaccagtatggatggcgtgtctgtcactcaggatggagcccgaaatattgctgagataaaaaccggggtggaaggacagctaaatgccaacctgaatgtctgggggaatgtgggcgttcaggttgccgataggggatataatgacacctctgcaatggttggcattaagtggcaattctgatctgaataatgagtaaaaggagagagagccgaacgggagataattcggctctctgtgtcattttcttgcagccagctttatccgtcagagtgaagactcgcagatttagctggcgcacaagatttaatcaaggtgtgttcaatggcttcgcatgatttgagtgtttttttggaagagttcggggcaacggtgaatttgacgttgcctggtatcgtgtccgaaaaagaacggcttttactcaagctgctaatggagggaatgtcggttacagaaatctcacagtacagaaatcgcagtgcaaagacaatttcacatcaaaagaagcagctgtatgaaaaactaggcatccagagtgatattaccttctggcgggatatcttttttcaatatcatccgcaagtcattagtggcacgggaaataaaaataatttttatatccctgataaccgttgtcaccatatcgtcacgcctgaagccatcagtctggcgttggaaaaccatgaatttaaaccgtggatccaaccggttttnngcgcgcagactggggtactgacgggctgtgaagtgcttgtccgctgggaacatccacaaacgggaatcatcccgccggatcagtttattcctctggcggagtcatccggtcttattgtcataatgacccgccaactgatgaaacagactgcggatattctgatgccggtaaaacatttgctgccggataatttccatattggtatcaacgtctcggcgggttgttttttggccgcgggatttgaaaaagaatgcctgaacctggtcaagaaattaggaaacgataaaatcaaactggttctcgagctaacggaacgtaaccctattccggtaacgccagaagccagagcgatatttgacagccttcatcagcataacattacctttgcgctggatgactttggtacgggttatgcgacctatcgttatctgcaggcgtttccggtcgattttattaagatcgataagtcatttgtgcaaatggcgagtgtcgacgaaatatccggtcatattgtggacaatattgtcgaactggcgcgtaagcctagtctgagtatcgtggcggaaggggtagaaacccaggagcaggcggatttaatgatcggtaaaggcgttcactttttgcagggctatttgtactctccgccagtaccgggtaataaatttatctctgaatgggtaatgaaagcaggtggttgatgtaaaccgctattcacagcgcatcgggaggttggcagcgattaattctcccgatgcagtaaatcctgatagatccccgttaatatgccatttggcgcaaattgttttttaatccactgcgtcacctgacccgtagcagaatgctgagtcgccagtaacatgcgtgaatcctggcgcgggttatggatttgtcgggtaaccagcagggattgcgccatcgcctcacggaccatgtaatctggcaaaaaaccaatcccttcacctaaaatctggcactgacatttggtgttgaaatctggcaccagaattgactcctgcccgtgcagcaaccagcccacttttttattaatcgtatgcgcggtgtcctccaccataatattagggtagagacgcagttggctttcggcgatggttccggcacaaaggctaacgggtgatccggggcgatagcaaaagcccagcgaatcgcgccaatttcagtgtaatcaataccgccgccgtccagcagcgtgtcgggtgcgccgatagcgatatttgcctgattattaataatcgcatcccagacgccgttatacacttcggtggtgacggtaatctggcaggtaggaaactgctttttcagcacctgtaataagcgtgcggtgtgtttgggcgtataaagcaactgattaatacaaatgcgcacacgcgcttctatgccctgcgaaatagtatcgatgctgcgtttgatggcgtgaaaatcattcagcaggtcggtagctttgcggaaaaaataacgcccggactccgttaactcaatgctgcgggtactgtgagtgaacagcaccacatccagccctgtttccattcgcttgatggtgtagctaatggcggaagtggttaaacccaactcttctgcggctttactgaaactgccaaaacgcgcagcggtagtaaatgccaacagattctcttcggtaaaaattgagttcattaaaccattcccgccattatctaatatgaatttctccaggcataactgtagaggtatcaattagagatgggtaatcatttttgaataacttttaatacccgtcgcgtttagtcgtcgcttcgcttaatttttgtccgccatattctgaaattatccccacgcagttacccgccagaaaacccagtaacgtcaccgtccagttcatcccgctggcaaaaaacagcgtcatgccgagaaagccaccgggaataaatgacagtaaccagaaacgcccttgccagaccaccaccgccgagaagggtacggtagtaattacgctcgcccagaacgcggacagtccacttacagaggccagccaaccggcagccagcgcggcgaaaaacgcccacaccatcccggaataattaaccgacagacttctgataaaccccgatttaccgccgcctgcggcataaaaactgcaaaaggcgacgaagccaatggttcctaataattcctaataattcctaataattcccatccctgagagagcccgacatgtgaagacactaactgccaaagccctgcacaaataccgacggtgacacccgttgccgtgagtccgttcatcttgttcccctctggttagacatggacgaaagctactcttacatgtgcagactatagagaaataaaacctgattgagtgaaagggtatcgggtcaaagaaacaaatattgcactaccgcacactgcgaaaagattgttgaacatcattcaacaaaaaggcgaaatacggcgaattaaatttaagcgggttcttttatcagattatcgttgctattctcaattcatcgaaaacagccacaaaaaccaggggaatgtgaatgagtataaaaaatctacctgccgactatttattggctgcacaacagggtgatatcgataaagtaaaaacctgccttgcgctgggtgtcgatattaatacctgcgatcgtcaggggaaaacggcaattacgctggcaagtttatatcagcaatatgcttgcgttcaggcattaattgatgccggagcggatattaataagcaagatcatacctgtttaaatccttttttaattagctgtctgaacggtgatttaacgctgctacgaattattttaccggctaaaccagaccttaattgcgtcacccgttttggcggtgtcggcctgacgcctgcctgtgaaaaaggccatttaagtattgtaaaagagcttttggcgcatacggaaattaacgttaaccagaccaaccatgttggctggacgccactactggaagcgattgtgcttaacgatggcgggattaaacagcaggcgattgtgcagttattgctggaacacggtgccagcccgcatctgaccgataaatatggcaaaacgccactggaactggcgcgggaacggggctttgaagagattgcgcagttactgattgccgcaggtgcataaaccgggaggcttgctatcaacacaccagaaaaacggtgtgtgtgggcgctaactgcggatgcggattttctggcgcagcgagggcaaggacaggttgaacaggtctttgccagagcggtaaatatcgcactcccggctcgccagcagttgctgacgctgctttgtgaagagtacgacaatgcgccaaacagttgtcggttggcactcactcactttgatgatctgttccggcatggtgataaggttcagtttgacgatcaaggtattacggttggtcaacatcttcatatagagatgagtcgttgtcggcgttggctgtccccaaccttgcaaatgaccgctgtgaattttcgccttatcgcctggcaacagtggcacgacatcattcatcagcacctgggggaaaatgaaaccctgtttaattatcgnggcgataatccgttttatcaggcgttaaataaagaattacatattaaacgacgggcagttatacaggcagtaatcgataaacaaaatatcgcctcagcggtcgccagtatgatgggcttagggattggccttacgccatcagccgatgattatttaacaggtctggcacttattttatttatttccgggcatccggcgggaaaatacaaagaggaattttatctcggcttgcaacgcggcagaaataataccacgttattaagtgccataacgctggaagccgcattacaacaacgctgccgggaaaatattcatcgttttattcacaacattatttatgacatccctgggaacgcaactcaggcaatagaaaaaattaaacatattggctccagttccggctgcgacatgctgtatggcatggccgatggttgtgcgctgagccaaacctacggagggaattatgtcagttaaaatagtcattaaaccgaatacctattttgattctgtctcgctgatgtctatctccacgcgtgcaaataaactcgacggcgtcgagcaggcatttgtggcgatggcgaccgaaatgaacaaaggtgtgctgaaaaatttaggactgctgacgccggagctggagcaggcgaaaaacggcgacctgatgattgtcatcaatggtaaatcgggggcggacaacgagcagttgctggtggagattgaagaactgttcaacaccaaagcgcaaagcggctcgcacgaggcgcgttacgccactattgccagcgccaaaaagcatatcccggaaagtaacctggcggtgatttcggtcaacggtctgtttgccgctcgcgaagcgcgtcaggcgctgcaaaacgatctcaacgtgatgctgttttccgataacgtctcagttgaagatgaactggcgctcaagcaactggcccacgaaaaagggctgctgatgatggggccagactgcggcacggcgattatcaacggtgcggcgctctgctttggtaacgccgtgcgtcgcggcaacatcggtattgttggcgcatccggcaccggcagtcaggagttgagcgtccgcattcatgaatttggcggcggcgtttcgcaactgattggcaccggcgggcgcgacctgagcgagaaaatcggcggcctgatgatgctcgacgccatcgggatgctggaaaacgatccgcaaactgaaatcattgcgcttatctccaaaccgcctgcgcctgcggtggcccgcaaagtgctggaacgtgcgcgcgcctgccgcaagccggtggtcgtttgcttcctcggtcgtggcgaaacgccagtggatgagcaggggctacagtttgcccgcggcaccaaagaggcagcgctaaaagcggtgatgctctccggcgtgaaacaagaacatctcgacctgcataccctgaaccagccgttgattgctgacgtgtgcgctcgcctgaagccgcagcagaaatacattcgtggcctgttctgcggtggcacgctgtgcgatgaaacgatgttcgcggtgatggaaaaacacagcgatgtctacagcaacatccagcccgatccggaattccgcctgaaggatatcaaccgcagcatcaaacacaccttcctcgactttggcgatgacgacttcaccaacggcaagccgcacccgatgattgaccctaccaaccgcatcagccgcttgatcgaagaggcgcgcgatccagaagtggcggtgatcgtgatggattttgtgctcggatttggatcgcatgaagatccggtcggttccaccatcgaggcgatcaaagaagcgaaagcgatcgccgctgccgaaggacgcgagttgatcattctcgcctatgtgctgggtaccgatcttgatacgccatcgttagaacaacaaagccagatgctgcttgatgccggcgtgattctggcgagcagcagcaccaataccggattgctggcgcgtgaatttatctgcaaaggggaggaagcctgatgagccagtcactgtttagccaaccattgaacgttattaacgtcggcatcgccatgtttagcgatgacctgaaaaagcagcatgtagaagtgactcaactcgactggacgccgccggggcagggcaatatgcaggtggtgcaggcgctggataacattgccgattcgccgctggcagacaaaatcgccgccgctaaccagcaggcgctggagcgcattatccagtcgcatccggtgctgattggttttgatcaggcgattaacgtggtgccgggcatgacgccgaaaaccattcttcacgccgggccgccgatcacctgggaaaaaatgtgcggcgcgatgaaaggcgcggtcaccggagcgctggtgttcgaaggactggcgaaagatctcgacgaggcggctgaactggcggcttccggggagatcaccttctcgccgtgtcacgagcacgactgcgtgggatcgatggcgggtgtgacctcggcctcgatgtttatgcacatcgtaaaaaacaaaacctacggcaacatcgcttataccaacatgagcgagcagatggcgaagattttgcgtatgggcgctaacgaccagagcgtgattgaccgcctgaactggatgcgtgatgtgcagggaccaatactgcgcgacgcgatgaaaattatcggcgaaatcgatctgcgcttaatgctggcgcaggcgctgcatatgggcgatgagtgccataaccgcaataacgccgggacgacgctgctgattcaggcgctgacgccggggattatccaggcgggctattccgtcgcgcaacagcgcgaagtgtttgagtttgttgccagtagcgattacttctccggcccgacgtggatggcgatgtgtaaagcggcgatggatgcggcgcacggcatcgaatacagcaccgtcgttaccaccatggcgcgtaacggcgtcgagttcggcctgcgggtgagcggcctgccggggcagtggtttaccggcccagcgcagcaggtcatcggcccgatgtttgctggttataagccggaagattcggggctggatatcggcgacagcgccatcacagaaacctacggtattggcgggtttgccatggcgaccgcgcctgcaatcgtcgcgctggtgggtggcacggtggaagaggctatcgatttctcccgtcagatgcgcgaaatcacccttggcgaaaaccccaacgtcaccattccgctgctcggttttatgggcgtgccgtcggcagtcgacatcacccgcgtgggtagcagcggcattctgccggtgatcaacaccgccatcgcccataaagatgcgggcgtcggcatgattggcgcgggcattgtgcatccaccattcgcctgcttcgagaaagccattcttggctggtgcgaacgttacggcgtttgacctacctgttcataccggatgcggcgtgaacgccttatccggcctacgaatggcgcaagaatctgtaggcctgatnagcnnagcnnatcaggcatttgtcaccattgccggatgcggcgtgaacgccttatccggcctacaagtggcgcaagaatttgtaggcctgataagcgnagcgcatcaggcatttatcaccattgccggatgcggcgtgnnnnnnnnnnccggcctacgaatggcgcaagaatctgtaggcctgataagcgtanngcnnnnnnnnnnnnnnnnnnnnnnnnnnnnnnnnnnnnnnnnnnnntccggcctacgaatggcacgagaattgtaggcctgataagcgtagcgcatcaggcatttgtcaccattgccggatgcnnnnnnancgccttatccggcctacgaatggcacgagaatttgtaggcctgataagcgtagcgcatcaggcagtctggcgttggtcataaccccatcaccctctgtagcggacataacaacatgaaagaacttgtggtcgttgccattggtggcaacagcattatcaaagataacgccagccagtcgattgagcatcaggcggaggcggtgaaagccgtggccgatacggtgctggaaatgctggcttccgattacgacattgtgctgacccacggtaacgggccgcaggtcgggctggatttacgccgtgcggagattgcccacgagcgcgaagggctgcccttaacgccgctggcgaactgtgtggcagatacgcagggcggcattggctacctgatccaacaggcgctgaacaaccggctggcgcgtcacggcgagaaaaaagccgtcaccgtggtgactcaggtggaagtggataaaaacgatccaggttttgcccatcccaccaagcccattggtgcattcttcagtgaaagccagcgtgacgaattacaaaaggcaaaccctgactggcgttttgttgaagatgccggacggggctatcgccgcgtggtcgcctcgccggaaccgaaacgtattgtcgaagcacccgccattaaggcgctgatccaacaaggctttgtggtgattggtgcgggcggcggcggaattcctgtggtgcgtactgacgcgggagattaccaaagcgtggacgcggttatcgacaaagatctctctaccgcgctgctggcccgtgaaattcacgccgacattctggtgatcnccaccggcgtcgaaaaagtctgtatccactttggtaaacccgagaagcaggcgctggatcgggtggatattgccaccatgactcgctatatgcaggaaggacatttcccgcccggcagcatgttgccaaaaatcatcgccagcctgacgttcctggaacagggcggtaaagaagtgattatcaccacgccggaatgcctgccagcggcgctgcgcggtgaaacgggcacccacattattaaaacgtaaggacgtaagatgaaagaaaataatagccgccgtgaatttctgagccagagcggtaagatggtcaccgccgccgcgctgtttggtacctctgtgccgctcgcccatgcggcggtctctggcaccacaaactgcgaagcgaacaacaccatgaaaatcactgacccgcattactatctcgacaacgtgctgctggaaaccggttttgactacgaaaatggcgtggcggtgcagacccgcacggcgcgccagaccgtggagattcagaacggcaaaattgtcgcgctgcgcgagaataagcagcacccggatgccacgctgccgcactatgacgctggcgataagctgatgctgcccaccacccgcgacatgcatattcatctcgacaaaacgttttacggcgggccgtggcgctcgctcaatcgcccggcaggcaccaccatccaggacatgatcaaactcgagcagaaaatgctgccggagctgcaaccgtacactcaggagcgggcagaaaaactgattgatttattgcagtcgaaaggcaccaccattgcccgcagccactgcaatatcgaaccggtttccggcctgaaaaatctnnnanntttgcaggcggtgctggcgcgacgtcaggcgggctttgagtgtgaaatcgtcgccttcccgcagcacggtttgctgctgtcgaaatcggaatccttaatgcgtgaagcaatgcaggcgggtgcgcattacgtcggcgggctggacccgaccagtgtcgatggcgcgatggaaaaatccctcgacaccatgttccagattgcgctggactacgacaaaggcgtcgatattcacctgcacgaaaccactccgtcgggcgtggcagccatcaattatatggttgaaacggtagagaaaacgcctcaactgaaaggtaagctgaccatcagccacgcctttgcgctggctacgctcaacgagcaacaggtagatgaactggcgcatcgcatggcggcgcagcaaatttctatcgcctcgacggtgccgattggcacgctgcatatgccgctcaaacagttgcacgacaaaggcgtaaaagtgatgactggcactgacagcgttatcgaccactggtcgccttatggtctgggcgacatgctggaaaaagccaatctctacgcgcagctctatattcgtcctaacgaacagaacctctcccgttcgctgtttctagccactggcgatgtattgccgctgaatgaaaaaggcgagcgtgtatggccaaaagcgcaggatgacgccagctttgtgctggtggacgcctcctgttccgccgaggcggtggcgcgtatctcgccgagaaccgcaacgttccataaagggcaactggtgtgggggagtgtggcaggttgatgcgcatttgaaacgcctgcaacggtgaatagtaagagatttaagccccaggaagtggggcgggaatggtttgctaatgaatgatcctgaactttataatctcccggcataatttccaggggattatttgagagaaatacacaaaagtgagttttaacaaaggtatttatcaggccataaatgtgacctgcttcggataaaaaagattcagtatcgaaaaaccaatgatactcttgctgatggttaccaacagtaattaagatgtgatttgtttttccgtaatcgcaaaaatattgccatgaccataaaagaaaaattctcacaaaaatatccccatgcttccttttgtacttttggcgattcagccgcgttggccgatcacctcgcaacgttgattgcgactggtgttaaaacagcttcctgtggttcgctggcgggatgtattgaagacaacgcatttccgatgattggtgagtataagattgtagaaaatagccgtggtgagcctgtatgtgttatcagagtgattggcctgcatttactgcgcttttctgatgtcaccgcggagcttgcccgtaaggaaggtgaaggtgacctcagtcttgaatattggcgtaatgaacaccgtcgttttttccaggcagaaggaagctattcaccagaaatggacgttatctttgaagaatatgcccttattgacgttgtgtagataactatttatctacatgaaataagctcacaaacataaaatatcgctaattttgtttattttgctgttttttacgtgatgaatgtcacacttattattgctgcccgttttgtccatatttataaccatatttttaatagctgcctgaaatagagctgtttattctgcannnnnnnattcgaaaattcttattctctccagcncgctaatttgggcgaacacttcctgactaccctgcaatgaggctgaaatgatgaataaacgttttgttatcaatatggtgtcttcgctgttattaggcgctgcgctaatttctgcgccgctccaggcagcggaaaaagtcgtggtgaatatttctaaagtcgatggtatgccgtggtttaatcgcatgggcgaaggtgtggttgaggcgggtaaagcctttggtgttaatgcctcacaggtggggccttcaagtactgatgctccgcaacaagttaaaattattgaggatttaatcgcccgtaaggttaatgcaattactatcgtgccaaacgatgccaacgtgctggaaccggtattcaaaaaagcgcgagatgccggaattgtggttctgaccaacgaatcccccggtcagccaagtgctaactgggatatcgaaatcattgataacgaaaaatttgccgctgaatatgttgagcatatggcgaaacgcatgggtggcaagggcggctatgtgatttacgtgggtagtttgaccgtgccgcagcataacttatgggctgacttgctggtgaaataccagaaagagcattacccggatatgcatgaagttacccgccgcatgccggttgccgagagtgtggatgtctcacgtcgtactacactggacctgatgaaaacctatcctgacttgaaagcggttgtctcctttggttcaaacggtccgattggcgcgggacgtgcggtgaaagagaaacgggcgaaaaataaagtcgcagtctatggcatgatgatcccttcacaggcggcatcactgattaaaagtggtgatatcaccgaagggattacttacgatccggcctctgcaggttacgcactcgcagccgtcgccagcacgttgctgaagggtgaagagatcaagcctggattagaaatgcagaatctgggtaaggccgaggtagatatggataagcgaattatccgtttccataaggtattactggtcaacaaagacaatatcgactcactttattaatccatttcttcggggcgaaagccccgattcttattgccaggggatgttatggaaaccttcctttcccttcgtcatatcaacaaaacgtttcatgccacgcgagcgctgcgcgatgtttctctcgactttatgtcgggtgaagtgcactgccttgccgggcaaaacggctgtggtaaatcgacgttgattaaaattatgtccggtgtttatcgcccggatgagggagcggaaattacgcttggtgggaaaaactggtcaaagctgacacccgccgcttcggtggngcaggggattcaggtgatttatcaggacctctctttatttcctaacctgagtgtctgggagaatatcgccgtgaatcactatcaccacggtctgtttgttaaccgccgtcgtctgcgtgaggtggcgcaggcggcaatgactagtattaacgtcacattgccactggatacgctcgtttctgagctttcaattgcccgctgtcagctggtggcaatttgccgtgcactggcgcaggacgcacggttgatcgtgatggatgaaccaaccgcttcgctgacccatcaggaagtgcaagggttattacaggtggtgcatcaattgcgtgaacgcgggatctgcgtggtctttgtcagtcatcgtctggaagaagtgatggaagtttccgaccgtatttcagtgctgaaagatggtgagctggtcgggacttttccggctgcagagatgaccacaaaacaactcggtttcctgatgaccggccaggagtttgaatatcaggtgcgagagttgtggcagggaaaatccagccccccggtgctggaggtgcgtaatttaagtcgtcatggggaatatctaaatattaacttgcgggtggaagcgggcgaagtggtatcgattgttggcctgcttggtgcggggcgcacggaattatgtctgagtctgtttggtatgacccgaccagatgctggcgagatcctcatcaacggccagctggttacactgcatagtaaccaggacgccatccgccacggtattggttatgtttcggaagatcgcatgtcgcgcggtttggtgatggcgcaatctattgaagacaacatcattagcactgtttttcacaaggtaaaagatcgcttcggctttctgagtgaaactaaagtgcgtgacctggtggacaggctaatcaaggcattgaccatcaaagtctctgatcctcatcttccggtgaatacgctttctggtggtaacgcgcagcgagtatcgatcgccaaatggctggcgattgggccacgactgttgattctcgatagcccgacagtcggtgttgatatcgccaacaaagcaggaatatacggcattatcagcgatctggcggctcatggcattgcggtattgatgatctgcgatgaaattgaagaagcgtggtatcaaagccaccggattttggtaatgcaaaaaggtcagatcacccatagcttcctgcctgacagcagttctcaggccaggattgcggaggtggtaaatggctgaactgaaaaaacgccatgaattctggctggcattactgattgtggtgctgtttgttggccttgcctggcgcagcgacgagtttctgacattcggtaatttgtacgatctcgccaataactatgccatgttgactattctcgcctgtggtttgtttgtggtgttgatttccggtggaattgatatttcgtttccagcaatgaccatcattgcgcaatacggcatggtgctgttgctgcaaaaaattggtggcaacttcgctgtcgcgtttgcactggcaggctgcatcggcattttacttggcttaattaacgccttactggttaatcgcctacgggtgccttctatcatcatcactatctcgacgctgaatattttctatggcctgctgttatggttgagtaaaggtgtgtggctgtacgactttccgccgtggtttgagcagggggttatgttgttcaagtacaccgatgctgatggctatgactatggccttggtctgccgctgatcgccatgattacggtggtgctgctgacagcgtttatcatgaatttcaccagtgtagggcgcaaaatttatgcccttggcgggaaccgcgaatcagccagtcgcatcggctttagcgtgctgaaactgcaacttttcgtctacggctatatgggattgatgtctggcgctgcgggtgtagtgcagtcgtggacggtgatgactgtcgcccccgattctcttctgggttatgagctgacagtactggctgcggtggtgcttggcggcactagtttgctcggcgggcgcggcacgttaactggtactttgctcggcgtggtgttgttggcagtgatgcaaaacgggctaaatttattgggagtctcgtcttactggcaaacattgatcaccggcatcatcatcgttgccagcattagcgccacggcgtggagtcagcatcagaaccggagcctgctatgaaaaaatcgtggcgtaataacgttgagttttacttgatcggcctgctggtgctaactgttgccgcgttcagcattactatgccggagattttctggtcgataagtaatttccagtccgtcgcttcgcaaatgcccgtgctgggcattctggcgttggctatggcggtgaccatgctttgcggtggcattaacttgtcaattatagccactgctaacgcctgttcactggtgatggcgtgggtggcgactcagtatccaccgggtattgctacggttgtcgctacgttactggcgggcgctggcgcggcggtgataatcggtttatgtaacggcgtattgattgctggtattcgagtgtcgccaattcttgcaacgcttgggatgatgacgttgctcaaagggataaatattctggtgacaggtggtagcgccattgccaattatccctcatgggtgctgtggttgaatcatgcgcaatggttcggtattccgctaccgatgtggttgtttgccgcagtggcactggggctgtggatattgctggagaaaacgccgctcggtaaagccatttacctgattgggtctaacgaacgagcaacactttactccggcattaacactcgtcgggtgctgatttgggtttatgtcatttccgccttgctttgtgcggtagcggcatttttgatgatgtcgaaactcaactcggctaaggcctcttatggcgaatcgtacttgctggtgtcaatcctcgcggcagtactcggcggggttaatccggacggcggcagcgggcggataattggtatggtgctggcgctgtttcttctgcaaattattgaaagcggcttcaatattctcggtataagcccctacctgacgatggccttatggggaacgttgctgctctgtttcattcaggctcgcggcatgttggggctggatcgggtggtttaaatattggctatattcaatggacgcgttttgccgcgatgacatatcaggcgtcgccaaatacacatagctaatcaggagtaaacacaatgaagatcaaagctgttggttcatattccgctaaacaaccacttgaaccgatggatatcacccggcgtgaaccgggaccgaatgatgtcaaaatcgaaatcgcttactgtggcgtctgccattccgatctccaccaggtccgttccgagtgggcggggacggtttacccctgcgtgccgggtcatgaaattgtggggcgtgtggtagccgttggtgatcaggtagaaaaacatgcgccgggcgatctggtcggtgtcggctgcattgtcgacagttgtaaacattgcgaagagtgtgaagacgggctggaaaactactgtgatcacatgaccggcacctataactcgccgacgccggacgaaccgggccatactctgggcggctactcacaacagatcgtcgttcatgagcgatatgttctgcgtattcgtcacccgcaagagcagctggcggcggtggctcctttgttgtgtgcagggatcaccacgtattcgccgctacgtcactggcaggccgggccgggtaaaaaagtgggcgtggtcggcatcggcggtctgggacatatggggattaagctggcccacgcgatgggngcacatgtggtggcatttaccacttctgaggcaaaacgcgaagcggcaaaagccctgggggccgatgaagttgttaactcacgcaatgccgatgagatggcggctcatctgaagagtttcgatttcattttgaatacagtagctgcgccacataatctcgacgattttaccaccttgctgaagcgtgatggcaccatgacgctggttggtgcgcctgcgacaccgcataaatcgccggaagttttcaacctgatcatgaaacgccgtgcgatagccggttctatgattggcggcattccagaaactcaggagatgctcgatttttgcgccgaacatggcatcgtggctgatatagagatgattcgggccgatcaaattaatgaagcctatgagcgaatgctgcgtggtgatgtgaaatatcgttttgttatcgataatcgcacactaacagactgaaaaaattaataaatacgctgtggtttaacatattaacttcgctctccacttaactttttagttaaggagagcgaaataatatcaaagtagcagtaaaacctataacgtaaattcaaattgttaaattaactccctccagtacctaatacttcacacgttagttatgagcgatttctgatagtgcctggtttaatcagagctttattatctgcgacgtttatttttatttaagagagatcgcgatgatatcattaaaagctccgcacaataatttgatgccatatacgcaacaaagcatacttaatacggttaaaaacaatcagttaccagaggatatcaaaagctccctggtttcctgtgtcgatatattcaaggttttgattaaacaatattatgattatccttatgattgtcgtgatgatttagtcgatgacgacaaactcattcatctcatggctgccgtacgagactgtgagtggtcagacgataacgcactcaccataaatgtgcagtttaatgatttccctggattttatgactggatggattaccctgatcacccggttaagtttgtttttcgcatacttgaaaatcaaaaagggacagtttgggtatatgaccaggatgatgcgtttcttgatattaaagcaaatgtgcaggctggacgctttaccgggcttaagaaattagtgcagtttatcaattcagtgcgaacagattgcaaatgtattcttcttgaacaccatatgcctttgctgagacttttccctaaagggaaagagtgtatgcatgtggaaaaatggcttcgcgaaatgtcgtctattccggagacagacgcgcccattaagcaggcgcttgcgcatggattattattacacttaaaaaatatctaccctgtttttcctgaatcactggtgatgttattgctctctgttctggacgtaaaaacatacagagatgatgcacgattaaatgaatggatatctaatagagtccaggaattaggtgacagatattatcctgtaaataagcacgttaaaatccgctacactctttagttcagaaagggttccacctgcaagttgttattccacctgagagtgaatcgcaatgcaggtaatcatttcatctgtatatctgtatgccaactggcattccatctcttttttcgccgatattttgttgcgatcggcgacacttcgcttaaaaaagcaccagcagtggtttcgcagccatgcggtgtataaaaaaaaatgatctcatgcagatgttttgtgaatgtgtgggttgacattcatatgaaaaaaatcataattccatcatgtttgtgtggggtcttttctgtatcttacgcatcgcactcaagcctgacagaaaatatgctgtaaggctcatatcaaaaaccgccattagctcatcaggaagagcagacgacaaccaggattgttgtatggtacggggttcgaggcctcgatggcggtccaacttttcaaaactcttctgaattagatccccttattatcatccctgcaaagtggaacattgccattgtttggctattcaggacgggtcagaccaatgaaaaaagcccacacaggggagagtgggctgaaatgggaagctaaagactcaagtaaacttatcggaaataaggaccacgcattacgggggctatcatcgccgatggtcgggattcggcaaatcaggttgattacgtagagagtaaattatctgctcaccgctgtgtcaccccttcgtaaatcaggcgtagcgcgaatacaccaataattgcaccaataacccgactggcaacgcgttgcatacgcccataagcacgacgcacagcgggcaaagaaaacgcctgactaagaaaaactcgccagataattgatgcgagcacaatccccgcccaggccattaaacgtgcccatgttggtgtttcggcatttaatgttactgagaaaatactaataaaaaataaaacggtttgtgggttagagagatcggtaattaatctacggcgaaaaaagacataccagggggcgttaatcggttgttgtagtgtgctcatttgcggtgttgactggcggcgcatgctgcaccacgcaaaccataagagataagcgccgccgacgattctgataagcgaaaaaatctcctcacactgcgtaattagcgttgcaagaccaaacaaacccaacccggaataaaatgcatcgcccagcgccacgcccagtccggtcagcactcctgcgcgtcgaccggaagccaggctggtttgtactaccacaaaaagattggctcccggattaaaaaaagtaatcacgaacagtcctacggtcaggtaaacggcatgcaaaggatccatagtgatttcatccataaataagtgaactaactgcatcatatttctaccaaaaataatcgggtgcgagagagagcacaaagtgtcttatttccggttactggcgtttatgccctgactgaactaattattaatcaacccaataatgtcggtgggtgatagtgtgataacaactctggagccgtaatatgaaaataatctctaaaatgttagtcggtgcgttagcgtttgccgttaccaatgtctatgccgctgaattgatgaccaaagcggaatttgaaaaagttgaatcgcagtatgaaaaaataggtgatatttcaaccagtaatgaaatgtcgactgcagatgcaaaagaagatttaatcaaaaaagccgatgaaaaaggggctgatgtgttggtactgacctccggtcaaactgacaataagatccacggcacggcggatatttataagaagaagtaattctgaatcctatgtaaacatccccgatgcgtaagtttatcggtgatcatctattgaaatttatgccggataaagcgttcgcgctgcattcggcagttcagcttttcagccgccgccagaacgtcgtccggctgatgcctaaataattcgccgctgctgttttatcgccattaaatttctccagtgcctgttgtggtgtcagcaagcgtggagcgggaattttcgccgactcgcgcgccagttccggcagtagcagctgcaaaaactgcggcgttaaatccggcgtcggttccacacttaaaaatagcgccagtcgctccatcatattgcgcagttcacgaatattacctggccagtcgtagtgcaccagcacggtttcgcttgcctgtaatccctggcgtaatgcggcagaaaatggggcggagagcgccgccagagacactttcaaaaagctttccgccagcggaagaatatctgccacccgctcgcgcagtggtggcaattgcagacgcaaaatactcagccgataaaacagatcacggcgaaactgcccttgccgcatatcttcttccagattgcagtgagtggcgctaatgacccgtacatctaccggaacaggctgatgcccgccgacgcgggtgacctctttttcttccagcacccgtaacaggcgagtctgcaaaggtagcggcatttcgccaatctcatccagaaacagcgtgccaccgtgggcaatttcgaacagcccggcgcgatctccgcgtcgcgagccggtaaacgccccttcctcatagccaaacagctccgcttccagcagcgattcggcaatcgccccgcagttgacggcaacaaacggatgcgactttttgccctgtcgcgcatcgtggcgggcaaaatattcccgatgaattgcctgggccgccagctctttgcccgtccccgtttccccctcaatcaacaccgccgcactggagcgggcatacagcaaaatagtctgccgcacctgctccatctgtggtgattgaccgagcatatcgcccagcacgtaacgagtacgcagggcgttgcgggtggcatcgtgagtgttatggcgtaacgacatgcgcgtcatatccagcgcatcgctgaacgcctggcgcacggtggcggcggaatagataaaaattccggtcattccggcttcttctgccagatcggtaatcagccccgcgccgaccaccgcttcggtgccgttagcttttagctcgttaatctgcccgcgtgcgtcttcttcggtaatgtagctacgttgatcgaggcgcaaattaaaggttttttgaaacgccaccagtgccggaatagtttcctgataagtgacaacgccgatagaagaggtgagttttccggcttttgccagtgcctgtaacacatcgtagccgctcggtttaatcaaaataactggcactgacaggcggcttttcaggtacgcgccgttagagccagcggcgatgatggcgtcacagcgttcgtttgccagtttcttgcggatgtaggtcactgctttttcaaagccaagctgaataggggtaatgttcgccaggtgatcaaactcgaggctgatatcgcgaaacagctcgaataagcgcgttacagataccgtccagataaccggtttgtcgtcattcagccgtggtggatgtgccatagcgcaccgcaaagttaagataccgaatattgggtttagtcttgtttcataattgttgcaatgaaacgcggtgaaacattgcctgaaacgttaactgaaacgcatatttgcggattagttcatgactttatctctaacaaattgaaattaaagatttaattttattaaggcaattgtggcacaccccttgctttgtcgttatcaacgaaaataacaagttgataacaaaggatgggctatgtctctacactctccaggtaaagcgtttcgcgctgcactgactaaagaaaatccattgcagattgttggcaccattaacgccaaccatgcgctgttggcgcagcgtgccggatatcaggcaatttatctctccggcggtggcgtggcggcagggtcgctggggctgcccgatctcggtatttctactcttgatgacgtgttgacagatattcgccgtatcaccgacgtttgttcgctgccgctgctggtggatgcggatatcggttttggttcttctgcttttaacgttgcgcgtacggtgaaatcgatgattaaagccggtgcggcgggattgcatattgaagatcaggttggtgcaaaacgctgtggtcatcgcccgaacaaagcgatcgtctcgaaagaggagatggtggatcggatccgcgcggcggtggatgcgaaaaccgatcctgattttgtgatcatggcgcgcaccgatgcgctggcggtagaggggctggatgcggcgatcgagcgtgcgcaggcctatgttgaagcgggtgccgagatgttgttcccggaggcgattaccgaactcgccatgtaccgccagtttgccgatgcggtgcaggtgccaatcctcgccaacattaccgaatttggcgccacgccgctgtttaccaccgacgaattacgcagcgctcatgtcgcgatggcgctgtacccgctttcagcgtttcgcgccatgaaccgcgccgccgaacatgtctacaacgtcctgcgccaggaaggcacgcagaaaagcgtcatcgacaccatgcagacccgcaacgagctgtacgaaagcatcaactactaccactacgaagagaagctcgacgacctgtttgtccgtagccaggcgaaataaaaaacgcccgttggttgtattcgacaaccgatgcctgatgcgccgctgacgcgacttatcaggcctacggggtgaactgtaggtcggataagacgcatggcgtcgcatccgacaacaatctcgaccctacaaatgataacaatgacgaggacaatatgagcgacacaacgatcctgcaaaacagtacccatgtcattaaaccgaaaaaatctgtggcgctttctggcgttccggcgggcaatacggcgctctgcaccgtgggtaaaagtggcaatgacttgcattaccgtggctacgatattcttgatctggcggaacattgcgaatttgaagaagtggcgcatctgctgatccacggcaaactgccgacccgtgacgaactcgccgcctacaaaacgaaactgaaagccctgcgcggtttaccggctaacgtgcgtaccgtgctggaagccttaccggcggcgtcacacccgatggatgttatgcgcaccggcgtttccgcgctcggctgcacgctgccagaaaaagaggggcataccgtctctggcgcgcgggatattgccgacaaactgctggcgtcacttagctcgattcttctctactggtatcactacagccacaacggcgaacgcatccagccggaaaccgatgacgactccatcggtggtcacttcctgcatctgctgcacggcgaaaagccgtcgcaaagctgggaaaaggcgatgcatatttcgctggtgctgtacgccgaacacgagtttaacgcctccacctttaccagccgggtgattgcgggcactggctctgatatgtattccgcgattattggcgcgattggtgcactgcgcgggccgaagcacggcggggcgaatgaagtgtcgctggagatccagcaacgctacgaaacgccggacgaagccgaagccgatatccgcaagcgggtggaaagcaaagaagtggtcattggttttggtcatccggtttataccatcgccgacccgcgccaccaggtgattaaacgtgtggcgaagcagctctcgcaggaaggcggctcgctgaagatgtacaacatcgccgatcgcctggaaacggtgatgtgggagagcaaaaagatgttccccaatctcgactggttctccgctgtttcctacaacatgatgggcgttcccaccgagatgttcacaccactgtttgttatcgcccgcgtcaccggctgggcggngcacattatcgaacaacgtcaggacaacaaaattatccgtccttccgccaattatgttggaccggaagaccgccagtttgtcgcgctggataagcgccagtaaacctctacgaataacaataaggaaacgtacccaatgtcagctcaaatcaacaacatccgcccggaatttgatcgtgaaatcgttgatatcgtcgattacgtcatgaactacgaaatcagctccaaagtagcctacgacaccgcacattactgcctgctcgacacgctcggctgcggtcttgaagctctcgaatacccagcctgtaaaaaactgnnnnggccaattgtccccggcaccgtcgtacctaacggcgtgcgcgtccccggaactcagttccagctcgaccccgtccaggcggcatttaacatcggcgcgatgatccgctggctcgatttcaacgatacctggcttgcggcagagtggggccatccttccgacaatctcggcggcattctggcaacggcggactggctttcacgcaacgcggtcgccagcggcaaagcgccgttgaccatgaaacaggtgctgaccggaatgattaaagcccatgaaattcagggctgcatcgcgctggaaaactcctttaaccgcgtcggcctcgaccacgttctgttagtgaaagtggcttccaccgccgtggtcgccgaaatgcttggcctgacccgcgaggaaattctcaacgctgtttcgctggcgtgggtggacggtcagtcgctgcgcacctatcgccatgcgccgaacaccggcacgcgtaaatcctgggcggcgggcgatgccacttcccgcgcggtacgtctggcactgatggcgaaaacgggcgaaatgggttacccgtcagccctgactgcgcctgtgtggggcttctacgacgtctcctttaaaggtgaatcgttccgcttccagcgtccgtacggttcttacgtgatggaaaatgtgctgttcaaaatctccttcccggcggagttccactcccagacggcagttgaagcagcgatgacgctctatgaacagatgcaggcagcaggcaaaacggcggcagatatcgaaaaagtgtccatccgcacccacgaagcctgtattcgcatcatcgacaaaaaggggccgctcaataacccggcagaccgcgaccactgcattcagtacatggtggcgatcccactgctattcgggcgcttaacggcggcggattacgaggacaacgttgcgcaagataaacgcattgacgccctgcgcgagaagatcaattgctttgaagatccggtatttaccgctgactaccacgacccggaaaaacgcgccatcgccaatgccattacccttgagttcaccgacggcacacgatttgaagaagtggtggtggagtaccccattggtcatgctcgccgccgtcaggatggtattccgaaactggtcgataaattcaaaatcaatctcgcgcgccagttcccgactcgccaacagcagcgcattctggaggtttctctcgacagagctcgcctggaaccgatgccggtcaatgagtatctcgacctgtacgtcatttaagtaaacggcggtaaggcgtaagttcaacaggagagcattatgtcttttagcgaattttatcagcgttcgattaacgaaccggagcagttctgggccgagcaggcccggcgtattgactggcagacgccctttacgcaaacgctcgatcacagcaatccgccgtttgcccgttggttttgtgaaggccgaaccaacttgtgccacaacgctatcgaccgctggctggagaaacaaccagaggcgctggcgctgattgccgtctcttcggaaacagaagaagagcgcacctttacctttcgccagcttcatgacgaagtaaacgcggtggcgtcaatgctgcgctcgctgggcgtgcagcgtggcgatcgggtgctggtgtatatgccgatgattgccgaagcgcatattactctgctggcctgcgcgcgcattggcgctattcactcggtggtgtttgggggatttgcctcgcacagcgtggcggcgcgaattgatgatgctaaaccggtgctgattgtctcggctgatgccggagcgcgcggtggcaaaatcattccctataaaaaattgctcgacgatgcgataagtcaggcgcagcaccagccacgccatgttttgctggtggatcgcgggctggcgaaaatggcacgcgtcagcgggcgggatgtcgatttcgcgtcgttgcgccatcaacacatcggcgcgcgggtaccggtggcgtggctggaatccaacgaaacctcctgcattctctacacctccggcacgaccggcaaacctaaaggcgtgcagcgtgacgttggcggatatgcggtggcgctggcgacctcgatggacaccatttttggcggcaaagcgggcggtgtgttcttttgtgcttcggatatcggctgggtggtggggcattcgtatatcgtctacgcgccgctgctggcggggatggcgactatcgtttacgaaggattaccgacctggccggactgcggcgtgtggtggaaaatcgtcgagaaatatcaggttagccggatgttctcagcgccgaccgccattcgcgtgctgaaaaaattccctaccgctgaaattcgcaaacacgatctctcgtcgctggaagtgctctatctggctggagaaccgctggacgagccgaccgccagttgggtgagcaatacgctggatgtgccggtcatcgacaactactggcagaccgaatccggctggccgattatggcgattgctcgcggtctggacgacaggccgacgcgtctgggaagccccggcgtgccgatgtatggctataacgtgcagttgcttaatgaagtcaccggcgaaccgtgtggcgtcaacgagaaagggatgctggtggtggaagggccgctgccgccggggtgtattcagaccatctggggcgacgacgaccgctttgtgaagacgtactggtcgctgttttcccgcccggtgtacgccacctttgactggggcatccgtgacgctgacggttatcactttattctcgggcgcactgacgatgtgattaacgttgccgggcatcggctggggacgcgcgagattgaagagagtatctccagtcatccgggcgttgccgaagtggcggtggttggggtgaaagatgcgctgaaagggcaggtggcggtggcgtttgtcattccgaaagagagcgacagtctggaagatcgtgatgtggcgcattcgcaagagaaggcgattatggcgctggtggacagccagattggcaactttggccgcccggcgcacgtctggtttgtctcgcaattgccaaaaacgcgatccggaaaaatgctgcgccgcacgatccaggcgatttgcgaaggacgcgatcctggggatctgacgaccattgatgatcctgcgtcgttggatcagatccgccaggcgatggaagagtaaggtattgtcggatgcgtcgcgtggcgcatccgacagttgtgcgcagatgcctgatgcgacgctggcgcgtcttatcatgcctacaggcctgaaccgtaggtcggataaggcgctcgcgccgcatccgacaccatgcgcagatgcctgatgcgacgctgatgcgtcttatcatgcctacnnnnnnnnnnnnnnnnnnnnnnnnnnnnnnnncnncgcnnccgacaccatgcgcagatgcctgatgcgacgctgatgcnnnnnnnnnngcnnannggcctgaaccgtaggtcggataaggcgctcgcaccgcatccgacaccgtgctcagtgcctgatgcgacgctgatgcgtctcatcatgcctacaggccnnnnnnnnnnnnnnnnnnnnnngctcgcgccgcatccgacaccgtgcgcagatgcctgatacgacgcaggcgcgtcttatcatgcctacaggcctgaaccgtaggnngnntaaggcgcncgcgccgcatccgacaccgtgcgtagttgcctgatgcgacgctgacgcgtcttatcatgcctacccactgtttttacaccgataattttccccccacctttttgcactcattcatataaaaaatatatttccccacgaaaacgattgctttttatcttcagatgaatagaatgcggnggattttttgggtttcaaacagcaaaaagggggaatttcgtgtcgcaagataacaactttagccaggggccagtcccgcagtcggcgcggaaaggggtattggcattgacgttcgtcatgctgggattaaccttcttttccgccagtatgtggaccggcggcactctcggaaccggtcttagctatcatgatttcttcctcgcagttctcatcggtaatcttctcctcggtatttacacttcatttctcggttacattggcgcaaaaaccggcctgaccactcatcttcttgctcgcttctcgtttggtgttaaaggctcatggctgccttcactgctgctgggcggcacccaggttggctggtttggcgtcggtgtggcgatgtttgctattccggtgggcaaggcaaccgggctggatattaatttgctgattgccgtttccggtttactgatgaccgtcaccgtcttctttggcatttcggcgctgacggttctttcggtgattgcggttccggctatcgcctgtcttggcggttattccgtgtggctggccgttaacggcatgggcggcctggacgccttaaaagcggtcgttcccgcacaaccgttagatttcaatgtcgcgctggcgctggttgtggggtcatttatcagtgcgggcacgctcaccgctgactttgtccgctttggtcgcaatgccaaactggcggtgctggtggcgatggtggcctttttcctcggcaactcgttgatgtttattttcggtgcagngggcgctgcggcactggggatggcggatatctctgatgtgatgattgctcagggcctgctgttgcctgcgattgtggtgctggggctaaatatctggaccaccaacgataacgcgctctatgcgtcgggtttaggtttcgccaacattaccgggatgtcgagcaaaaccctttcggtaatcaacggtattatcggtacggtctgtgcattatggctgtataacaattttgtcggctggttgaccttcctttcggcagctattcctccagtgggtggcgtgatcattgccgactatctgatgaaccgtcgccgctatgagcactttgcgaccacgcgtatgatgagtgtcaattgggtggcgattctggcggtcgccctggggattgctgcaggccactggttaccgggaattgttccggtcaacgcggtattaggtggcgcgctgagctatctgatccttaacccgattttgaatcgtaaaacgacagcagcaatgacgcatgtggaggctaacagtgtcgaataacgctttacaaacaattattaacgcccggttgccaggcaaagaggggctgtggcagattcatctgcaggacggaaaaatcagcgccattgatgcgcaatccggcgtgatgcccataactgaaaacagcctggatgccgaacaaggtttagttataccgccgtttgtggagccacatattcacctggacaccacgcaaaccgccggacaaccgaactggaatcagtccggcacgctgtttgaaggcattgaacgctgggccgagcgcaaagcgttattaacccatgacgatgtgaaacaacgtgcatggcaaacgctgaaatggcagattgccaacggcattcagcatgtgcgtacccatgtcgatgtttcggatgcaacgctaactgcgctgaaagcaatgctggaagtgaagcaggaagtcgcgccgtggattgatctgcaaatcgtcgccttccctcaggaagggattttgtcgtatcccaacggtgaagcgttgctggaagaggcgttacgcttaggggcagatgtagtgggggcgattccgcattttgaatttacccgtgaatacggcgtggagtcgctgcataaaaccttcgccctggcgcaaaaatacgaccgtctcatcgacgttcactgtgatgagatcgatgacgagcagtcgcgctttgtcgaaaccgttgctgccctggcgcaccgtgaaggcatgggngcgcgagtcaccgccagccacaccacggcaatgcactcttataacggggcgtatacctcacgtctgttccgcttgctgaaaatgtccggtattaactttgtcgccaacccgctggtcaatattcatctgcaaggacgattcgatacgtatccaaaacgtcgcggcatcacgcgcgttaaagagatgctggagtccggcattaacgtctgctttggtcacgatgatgtcttcgatccgtggtatccgctgggaacggcgaatatgctgcaagtgctgcatatggggctgcatgtttgccagctgatgggctatgggcagattaacgatggcctgaatttaatcacccaccacagcgccaggacgttgaatttgcaggattacagcattgccgccggaaacagcgccaacctgattatcctgccggctgaaaatggatttgatgcgctgcgccgtcaggttccggtacgttattcggtacgtggcggcaaggtgattgccagcacacaaccggcacaaaccaccgtatatctggagcagccggaagccatcgattacaaacggtgatcggctgggctgtgtgttgacaaagcgagcgtagtttatgccggatgcggcttgaacgccttatcaggcctacgtagagcactgaactcgtaggcctgataagcgtaacgcatcaggcaattgtgtcagtggttaccgcgattcattctcgccaacatccgcacattcctccaacgccatgtgcaaaaatgccttcgcggcggctgtctgccagctatttttccgccgcaacaaaaccgccgttctctccagtagtggcggggcaagaggaatcgctttaagcccgtcatgttgtgtggcaatcgctgctggtaacaatgtggaaagggaagtgcggcgaatcagctccagaaccgcgctaattgagttcgcctcaatgaccacctgtggatgcagccccgctttctcgcagtagtggtcaatctgctctctggtggcaaattccgcgctgagcaggaccagtttttcatcatgcaagcgactcaacgccacctgttcacaggcagccagcggatgatgttgcgccacgactaacgctaaactttctgtcagtaaaggaattgcctccagctccggcgaatgcacaggcgcgaaggcaatcccaacgtccagctcgtcgcgacaaagcagatcttcgattttctcctgcgacatttcctgtagctggagcgtgatgccggggtagcgcgcatagaaatccgccattaaggggccgataaagtagctcgtaaaggtgggggtgacggcgatacgcagcgatcctctcgtcagatcggcaacatcatgaatcgcccgtttacccgctcccagttcctgtaacgcccggctggcgtactgtcgccagacttctcctgcatcagtgagatgaatcgttcgcccgctacggtcaaacagcggcacgcctaaactctcctctaactggcgaatctgctgggaaagcgcaggctgagagacgtgcaacgcactggcggcacgggtgaagctgccatgttcagccacggcaagaaaataattgatatgtcgagagagcattcgccaacctataagtaaattcaatagaactcatcataaatgagacttttaccttatgacaatcggcgagtagtctgcctctcattccagagacagatagaggttaacggtgaaagagattattgatggattccttaaattccagcgcgaggcatttccgaagcgggaagccttatttaaacagttggcgacacagcaaagcccgcgcacactttttatctcctgctccgacagccgtctggtccctgagctggtgacgcaacgtgagcctggcgatcttttcgttattcgcaatgcgggcaatatcgtcccttcctacgggccggaacccggtggcgtttctgcttcggtggagtatgccgtcgctgcgcttcgggtatctgacattgtgatttgcggtcattccaactgtggcgcgatgaccgccattgccagctgtcagtgcatggaccatatgcctgccgtctcccactggctgcgttatgccgattcagcccgcgtcgttaatgaggcgnnnccgcattccgatttaccgtcaaaagctgcggcgatggtacgtgaaaacgtcattgctcagttggctaatttgcaaactcatccatcggtgcgcctggcgctcgaagaggggcggatcgccctgcacggctgggtctacgacattgaaagcggcagcatcgcagcgtttgacggcgcaacccgccagtttgtgccactggcagctaatcctcgcgtttgtgccataccgctacgccaaccgaccgcagcgtaaccttatttttaaaccatcaggagatgcaccatgattcagtcgcaaattaaccgcaatattcgtcttgatcttgccgatgccattttgctcagcaaagctaaaaaagatctctcatttgccgagattgccgacggcaccgggctggcagaagcctttgtgaccgcggctttgctgggtcagcaggcgcttcctgccgacgccgcccgccaggtcggggcgaagctggatctcgacgaagacgccattctactgttacagatgatcccactgcgtggctgcattgatgaccgtattccaaccgacccaacgatgtatcgtttctatgaaatgttgcaggtgtacggcacaaccctgaaagcgttggttcatgagaaatttggcgatggcattatcagcgcgattaacttcaaactcgacgttaagaaagtggcggacccggaaggtggcgaacgtgcggtcatcaccttagatggtaaatatctgccgaccaaaccgttctgacagccatgcgtaaccatcaaaagacgttcacgatgctgctggttctggtgctgattggtcttaatatgcgaccactgctcacctccgtcgggccactgctaccgcaattgcgccaggcaagcggaatgagctttagcgtggctgccctgttgaccgctctgccggtggttaccatgggcgggctggcgctggccggaagctggcttcatcagcatgtcagcgaacgtcgcagcgtcgccatcagtttgttactgattgccgtcggtgcattgatgcgtgagctttaccctcaaagtgcgctgctgcttagcagcgcactgctcggtggggtggggatcggcatcattcaggcggtgatgccttcggtgattaaacggcggtttcagcagcgcacgccactggtgatggggctgtggtccgcggctctgatgggcggcggtgggcttggtgccgccctgacaccctggttagttcaacatagcgaaacctggtatcaaacactcgcctggtgggcgctgcctgccgttgttgcgctctttgcctggtggtggcaaagcacccgcgaggtcgcctcttcccacaagacaacaaccattccggttcgcgtggttttcactcctcgcgcgtggacgctgggtgtttacttcggtctgattaacggtggttacgccagcctgattgcctggttacccgccttctatattgagattggtgccagcgcgcagtacagcggttccttgctggcattgatgacgcttgggcaagccgcaggagctttgctgatgcctgctatggctcgccatcaggatcggcgcaaactgttaatgctggcgctggcgttacaactggtgggtttctgcggctttatctggctgccgctgcaattgccggtattgtgggcgatggtgtgtggtttaggtctgggcggcgcatttccgctctgtttgctgctggcgctcgatcactctgtgcaaccggctattgctggcaagctggtggcgtttatgcagggaatcggttttatcatcgccgggcttgccccgtggttttctggcgtgctgcgtagtatcagcggcaattacttgatggactgggcgtttcatgcgctgtgcgtcgtagggctgatgattataaccctgcgttttgcaccagcacgttttccgcagctgtgggtcaaagaggcatgatgcgacgcttgtttctgcgctttgttcacgccggatgcggcctacatagatcactgaatttgtaggcctgataagcgaagcgtatcaggcaatttttataatttaaactgacgattcaactttgtaatctctgaaataatattgcttatcccggtcgtttatttcgcgaataacccgacaaggaacgccagccgccacgacgtttggtggaatgtcttttgtgacgatactacccgcgccaataacagaattatccccaatggtgacgcctggattaataaccacatgacttccgatccagacgttattgccaatcgttatcggaaaagagtacatctcaccgttttttctcaattcatggtgtacagggtgtcccgtaacggaaagagtaacgttgggtgcaatcaatacgttatcaccgattgttaccgtgtagtcatcgacaatggttaaattgaaatttgcataaaaattgcggcctatatggatgttggaaccgtaagagaaatagacggggggttctacccaggcgttttcccctaccgtggcaaacatttctttaatcaggctttctcttttatcaacttctgatggatgcgagtgattaaactcatacattaacgtttttctacgaagtcttttttcaggtaagccttcgcacatatcggtaaatagcttgcctgcttttattctttctgtcatcgacatgttcattgcgatcattccgttatgatatgttggtcggataaggcgctcgcgccgcatccgacattgattgcttaagcgacttcattcacctgacgacgcagtagagaaagcgggccggggccgctaagcgtgaacacggaaattaaggtgaagcccagcgccaccagacccagcaccagataagcgccctggaaaccgatgctttcatacatattacccgctagtacagacataaaaatcatcgccagttgcttaaagaagcagaaacagaccagataaatcgtcgctgaaaaacgcacttcaaactggctggtaatatatttaaagcagcccaccagcaggaacggtacttcaaacatatgcagcgttttcagaataaccacttccagcgctgaggtggcgaacgatgagccaataatacgtacagacataatagtgccagccagcagcagggcatttttcccaccgatgcgattaatgatcagtggcgcaaagaacataattgaggcgttaagtaattcgcccattgtcgttacgtagccaaatacccgcgtaccctgttcaccggtggcaaagaaagaagtaaagaaattagcaaactgttggtcaaaaacatcgtaggtgcaggaaacgccaataacatacagtgacaaaaaccacagttttggctgtctgaacagttccagcgccagtttaaggctaaatgccgaatggttggcacctaccgcattggcaaccgtggcggaagagggcgcatccgttttggcgaaaaagagtaaaatggcgaggatgagtgcacagccagaacccagccagaaaacgaactgattattgatggtgaacatgatgccgacaatcgaggcacacagcgcccagccaacacagccaaacatccgcgcgcgaccaaattcgaaattactgcgacggctgactttctcgataaatgcctctactgcgggcgcaccggcgttaaaacaaaagccaagataaataccaccaacaatcgatcctactaaaatgttgtattgtaacagtggcccgaagataaaaataaagaacggcgcaaacatcactaacatgccggtaataatccacagcaggtatttgcgcagcccgagtttgtcagaaagcagaccaaacagcggttggaataatagcgagaacagagaaatagcagcaaaaataatacccgtatcacttttgctgatatggttgatgtcatgtagccaaatcgggaaaaacgggaagtaggctcccatgataaaaaagtaaaagaaaaagaataaaccgaacatccaaaagtttgtgttttttaaatagtacataatggatttccttacgcgaaatacgggcagacatggcctgcccggttattattatttttgacaccagaccaactggtaatggtagcgaccggcgctcagctggaattccgccgatactgacgggctccaggagtcgtcgccaccaatccccatatggaaaccgtcgatattcagccatgttccttcttccgcgtgcagcagatggcgatggctggtttccatcagttgttgttggctgtagcggctgatgttgaactggaagtcgccgcgccactggtgtgggccataattcaattcgcgcgtcccgcagcgcagaccgttttcgctcgggaagacgtacggggtatacatgtctgacaatggcagatcccagcggtcaaaacaggcggcagtaaggcggtcgggatagttttcttgcggccctaatccgagccagtttacccgctctgctacctgcgccagctggcaggtcaggccaatccgtgccggatgcggtgtatcgctcgctacttcaacatcaacggtaatcgccatttgaccactaccatcaatccggtaggttttccggctaataaataaggtttttccctgatgctgccatgcgtggacagtggtaatcagcaccgcgtcggcaagtgtatctgccgtgcactgcaacaacgccgcttctgcctggtaatggcccgcagccttccagcgttcgacccaggcgttagggtcaatgcgggtcgcttcacttacgccaatgtcgttatccagcggtgcgcgggtgaactgatcgcgcagcggcgtcagcagttgttttttatcgccaatccacatctgtgaaagaaagcctgactggcggttaaattgccaacgcttattatccagctcgatgcaaaaatccgtttcgctggtggtcagttgcgggatggcgtggggcgcggaggggagtgtcacgctgaggttttccgccagacgccactgctgccaggcgctgatgtgtccggcttctgaccatgcggtcgcgttcggttgcactacgtgtaccgttagccagagttgcccggtgctctccagtcgcggtagttcaggcaattcaattacctgtttaccttgcggagcgacatccagaggcacttcaccgcttgccagcggcttaccatccagcgccaccgtccagtgcaggagctcgttatcgctatgacggaacaggtattcgctggtcacttcgatggttcgcccggataaacggaactggaaaaactgctgctggtgttttgcttccgtcagcgccggatgcggcgtgcggtcggcaaagaccagaccgttcatgcagaactggcgatcattcggcgtatcgccaaaatcaccgccgtaagccgaccacggattgccattttcatcatatttaatcagcgactgatccacccagtcccagacgaagccgccctgtaaacgggggtactgacgaaacgcctgccagtatttagcgaagccgccaagactgttacccatcgcgtgggcgtattcgcaaaggatcagtgggcgcatttctccaggcagcgaaagccattttttgatggaccatttcggcacagccgggaagggctggtcttcatccacgcgcgcgtacatcgggcaaataatatcggttgcggaggtgtcggctccgccgccttcatactgcaccgggcgggatggatcgacagatttaatccagcgatagagtgcgtcgtgattagcgccgtggcctgactcattccccagcgaccagatgatcacactcgggtgattacgatcgcgctgcaccattcgtgttactcgttcgctcatggccggtaaccagcgcggatcatcggtcagacgattcattggcaccatgccgtgggtttcaatattggcttcatccaccacatacaggccgtagcggtcgcacagggtgtaccacagcggatggttcggataatgcgaacagcgcacggcgttaaagttgttctgcttcattagcaggatatcctgcaccatcgtctgctcatccatgacctgaccatgcagaggatgatgctcgtgacggttaacgccgcgaatcagcaacggcttgccgttcagcagcagcagaccattttcaatccgcacctcgcggaaaccgacatcgcaggcttctgcttcaatcagcgtgccgtcggcggtgtgcagttcaaccaccgcacgatagatattcgggatttcggcgctccacagtttcgggttttcgacgttcagacctagtgtgacgcgatcggcataaccgccacgctcatcgataatttcaccgccgaaaggcgcggtgccgctggcgacctgcgtttcaccctgccacaaagaaaccgtcacccgcagctcatcgcgcagctcgccgtacatctgaacttctgcctccagtaccgcgcggctaaaatcatcattaaagagagtggcaacatggaaatcgctgatttgtgtggtcggtttgtgcagcaacgagacgtcacggaaaatgccgctcatccgccacatatcctgatcttccagataactgccgtcactccagcgcagcaccatcaccgcgaggcggttttctccggcgcntaaaaatgcgctcaggtcaaattcagacagcaaacgactgtcctggccgtaaccgacccagcgcccgttgcaccacagatgaaacgccgagttaacgccatcaaaaataattcgcgtctggccttcctgtagccagctttcatcaacattaaatgtgagcgagtaacaacccgtcggattctccgtgggaacaaatggcggattgaccgtaatgggatatgtcacgttggtgtagatgggcgcgtcgtaaccgtgcatctgccagtttgaggggacgacgacagtatcggcgtcaggaagatcgcactccagccagctttccggaaccgcttctggtgccggaaaccagacaaattgccactcaccattcaggctgcgcaactgttgggaagggcgattggtgcgggcctcttcgctattacgccagctggmgaaagggggatgtgctgcaaggcgattaagttgggtaacgccagggttttcccagtcacgacgttgtaatacgacggccagtgaatctgtaatcatagtcatagctgtatcctgtgtgaaattgttatccgctcacaatttcacacaacatacgagccggacgcatagagtgtaaagcgtggggtgcctaatgagtgagctgactcacattaattgcgttgcgctcactgcccgctttccagtcgggaaacttgtcgtgccagctgcattaatgaatcggccaacgcgcggggagaagcggtttgcgtcttgggcgccagggtggtttttcttttcaccagtgagacgggcaacagctgattgcccttcaccgcctggccctgagagagttgcagcaagcggtccacgctggtttgccccagcaggcgaaaatcctgtttgatggtggttaacggcgggatataacacgagctgtcttcggtatcgtcgtatcccactaccgagatatccgcaccaacgcgcaacccggactcggtaatggcgcgcattgcgcccagcgccatctgatcgttggcaaccagcatcgcagtgggaacgatgccctcatttagcatttgcatggtttgttgaaaaccggacatggcactccagtcgccctcccgttccgctatcggctgaatttgattgcgagtgagatatttatgccagcccgccagacgcagacgcgccgagacagaacttaatgggcccgctaacagcgcgatttgctggtgacccaatgcgaccagatgctccacgcccagtcgcgtaccgtcttcatgggagaaaataatactgttgatgggagtctggtcagagacatcaagaaataacgccggaacattagcgcaggcagcttccacagcaatggcatcctggtcatccagcggatagttaatgatcagcccactgacgcgttgcgcgagaagattgtgcactgccgctttacaggcttcgacgccgcttcgttctaccatcgacaccaccacgctggcacccagttgatcggcgcgagatttaatcgccgcgacaatttgcgacggcgcgtgcagggccagactggaggtggcaacgccaatcagcaacgactgtttccccgccagttgttgtgccacgcggttgggaatgtaattcagctccgccatcgccgcttccactttttcccgcgttttcgcagaaacgtggctggcctgattcaccacgcgggaaacggtctgataagagacaccggcatactctgcgacatcgtatagcgttactggtttcacattcaccaccctgaattgactctcttccgggcgctatcatgccataccgcgaaaggttttgcgccattcggcggggctgacgccgaagtgagatttaaaatgctgacgccaggtcacaggtgagagaaaacccacctcagccgctatccgctcaacgggcaactgactggatcccaacagttcctggctacggcgtaagcgttcagtaatgagccattcggcgatactcgaaccggtcgctttcataaaatggcgagttaatgtgcggcgactcatcattactcgctgcgccagcgagtcgagatcatgctgttgcgcaatgttttgccgcaggtaatccagcaggaggtttatgcgttcatcatgggtatttttcggcaccggttgctcaataaactgcgcctgaccgccggtgcgatatggcggtacgaccatccgtcgggcaatatggttagcatagtcgctgccaaaatgttgccgaacaatatacaaacagcaatccagcgccncggcagtaccggcagaggtaataatgccgtcatcgtctacgtacaacgcgttaatatccagatgtgtttgtggaaaacgtgcctgaaattcacgctcgaactcccagtgcgtggcggcacgcttatttttcagtaaacctgcatagccgagcacaaacgtgcccaggcaaagcccgacaatctgtgcgccgttatcccgtgcggtcgttaaggcttccagcagtttttgtggcggtttttgtgtaatggttccccagtaaggaattatcacaatatctgcctggatgactgcggtatagtcatgggtggcggttacggaaaacccatcggcagagtccacgtttcccggcttttcagcgcaaataatcacgtgaaagcgttttttctccgccatcttttcactaaacacgataaacggtacggaaaggtgaaaaggactaaaaccggcaacggcgataatggcaacagttagcgggcgcataacactctttatctccgaattagaatgtcaacgtttcaccatcttctggtacgttcacaaattcgataatttgattatctctggcgtattccttgagcgcatcacgcgtcagcaaacagtggtttacggcctccatatgtgtcgcgataatttgcgcttctgggagggtaaaatgtgttttgagaatatcttctgctcccataattatcgcgccatgccccagaacatgcgcaaatccggcattcaacacaaccacttctggttggaaagttagcattgtagcctcgacgtcgtcacgccagagggtatcgccagccagatagagcgttttctctgtcgggtgctggaaaacaacgccgcaagctgcgcctaaacgcttcgccatcgccgggtcggcataggtgcgatcggagccgtgctgccctgtcgttttatgcagagtaatatcgccaaatttagtctcgtcggtaagtacggtaagatgcgtaaatccttgtttattcagtgattcagcatcttgctcattttgcacataaatcagtttatctttagggacgacgcgggaggctgtttcgtcccagtgatcttcatgcaaatgggtcacgattagggcgtcaacgttgagtaacgttgttaaatcgcacggtaattctaccgttggattgcggatttctgcgcgtgccgttccggcaaaacccggataacttcctttaggcgcgagtaacgggtcgataagaaatgttttgccagcgtattggataatttgggtggcattacgaatttgcgtaattttcatgatttgctccacatcacagtattgatgtcattagcgtagcgtgcagcccgtactgtgcatgtgggcaaatgggcgaataacgatgagaatgggccaaattacacattggcgtaactagcgtaaatgcacgccgcttcgccgtccggccaccagaatagcctgcgattcaaccccttcttcgatctgttttgctacccgttgtagtgccggaagatgcttttccgctgcctgttcgatggtcattgcgctcgccatatacaccagattcagacagccaatcacccgttgttcactgcgcagcggtacggcgatagaggcgatcttctcctcctgatcccagccgcggtagttctgtccgtaaccctctttgcgcgcnnnnnnnagaatggcttccagctttaacggttctcgtgccagttgatagtcatcaccggggcgggaggctaacatctcgattaattccttgcgttcttgttccgggcaaaaggccagccaggtcaggcccgaggcggttttcagaagcggtaaacgccgcccgaccattgcccggtgaaaggataagcggctgaaacggtgagtggtttcgcgtaccaccattgcatcaacatccagcgtggacacatctgtcggccataccacttcgcgcaacagatcgcccagcagtggggccgccagtgcagaaatccactgttcgtcacgaaatccttcgcttaattgccgcactttgatggtcagacgaaaactatcatcggagggactacgccggacatatccctcttcctgcagcgtctccagcagtcgccncacagtggtgcgatgcaggccgctgagttccgccagcagcccgacgctggcaccgccgtcaagtttatttaacatatttaataacattagaccgcgggttaagccgcgcacggttttgtattccgtctgctcattgttctgcatattaattgacatttctatagttaaaacaacgttgtgcacctggtgcacattcgggcatgttttgattgtagccgaaaacaccctttctatactgagcgcacaataaaaaatcatttacatatttttaacaaaataagttgcgctgtactgtgcgcgcaacggcattttgtccgagtcgtgaggtactgaaatggcaatacaacaccctgacatccagcctgctgttaaccatagcgttcaggtggcgatcgctggtgccggtccggtcgggctgatgatggcgaactatctcggccagatgggcattgacgtgctggtggtggagaaactcgataagttgatcgactacccgcgtgcgattggtattgatgacgaggcgctgcgcaccatgcagtcggtcggcctggtcgataatgttctgccgcatactacgccgtggcacgcgatgcgttttctcaccccgaagggccgctgttttgctgatattcagccaatgaccgatgaatttggctggccgcgccgtaacgcctttattcagccgcaggtcgatgcggtgatgctggaaggggtgtcgcgttttccgaatgtgcgctgcttgttttcccgcgagctggaggccttcagtcagcaagatgacgaagtgaccttgcacctgaaaacggcagaagggcagcgggaaatagtcaaagcccagtggctggtggcctgtgatggtggggcaagttttgtccgtcgcaccctgaatgtgccgtttgaaggtaaaactgcgccaaatcagtggattgtggtagatatcgccaacgatccgttaagtacgccgcatatctatttgtgttgcgatccggtgcgcccgtatgtttctgccgcgctacctcatgcggtacgtcgctttgaatttatggtgatgccgggagaaaccgaagaacagctgcgtgagccgcaaaatatgcgcaagctgttaagcaaagtgctgcctaatccggacaatgttgaattgattcgccagcgtgtctacacccacaacgcgcgactggcgcaacgtttccgtattgatcgcgtactgctggcgggcgatgccgcgcacatcatgccggtatggcaggggcagggctataacagtggtatgcgcgacgcctttaacctcgcatggaaactggcgttggttatccaggggaaagcccgcgatgcgctgctcgatacctatcaacaagaacgtcgcgatcacgccaaagcgatgattgacctgtccgtgacggcgggcaacgtgctggctccgccgaaacgctggcagggtacgttacgtgacggcgtttcctggctgctgaattatctgccgccagtaaaacgctacttcctcgaaatgcgcttcaagccgatgccgcaatattacggcggtgcgctggtgcgtgagggcgaagcgaagcactctccggtcggcaagatgtttattcagccgaaagtcacgctggaaaacggcgacgtgacgctgctcgataacgcgatcggcgcgaacttcgcggtaattggctggggatgcaatccactgtgggggatgagcgacgagcaaatccagcagtggcgcgcgttgagcacacgcttcattcaggtggtgccggaagtgcaaattcataccgcacaggataaccacgacggcgtactacgcgtgggggatacgcaaggtcgcctgcgtagctggttcgcgcaacacaatgcttcgctggtggtgatgcgcccggatcgctttgttgccgccaccgccattccgcaaacactgggcaagaccctgaataaactggcgtcggtgatgacgctgacccgccctgatgccgacgtttctgtcgaaaaggtagcctgatatgcacgcttatcttcattgtctttcccactcgccgctggtggggtatgtcgacccggcacaagaggtactcgatgaggtcaatggcgtgattgccagcgcccgcgagcgtattgcggctttctcccctgaactggtggtgctgtttgcgccagatcactacaacggctttttctatgacgtgatgccaccgttctgtttaggcgttggagcgacggcaattggtgatttcggcagtgcggcaggagagctgcccgtgcctgtggagctggcggaggcctgtgcgcatgccgtcatgaagagcgggatcgatcttgccgtttcttactgtatgcaggtggaccacgggttcgcccagccgctggagttcctgctcggtgggctggataaggtgccagttctgcctgtgttcatcaacggtgtcgccacgccgctgcccggtttccagcgtacccgcatgttgggtgaagccattggacgtttcaccagcactctcaataaacgcgtgctgttcctgggttccggtgggctttcccatcagccgccggtgcccgaactggcgaaagccgatgcccatatgcgcgaccgcctgttggggagcgggaaagatttacccgccagtgagcgcgaattgcgtcagcaacgggtgattagcgccgctgagaagtttgttgaggatcagagaactctgcatccgctcaacccgatttgggataaccagttcatgactttgctggagcagggacgcatacaggaactggatgccgtcagtaacgaagagctttccgccattgccggaaagtcgacacatgaaatcaaaacctgggtcgccgcttttgccgctatttctgcatttggcaactggcgtagcgaagggcgttattaccgcccaatcccggagtggattgccggatttggctcgttaagcgccagaacagagaactgaatatgcaggagaagatgatgagttatcagccacaaaccgaagccgccaccagccgttttctgaatgtagaagaagcgggtaaaacgctgcgcatccattttaatgactgcggacaaggcgacgaaaccgttgtcctgctgcatggttccggcccgggtgctactggctgggcgaacttcagccgcaatatcgatccgctggtagaggcgggctatcgggtgatcctgctggattgtccgggttggggcaagagcgattcgatcgttaatagtggttcgcgatcggatcttaatgcacgaatcctgaaaagcgtggtggatcaactggatatcgccaaaatccacctgctgggcaactcgatgggtggccatagttctgtggcgttcacccttaactggccggagcgcgtcggcaaactggtgctgatgggcggcggtacgggcggcatgagtttgtttacgccgatgccaaccgaaggtattaagcgactgaatcagctttatcgtcagccgactatcgaaaacctgaagctgatgatggatatcttcgtttttgataccagcgatttgaccgacgccctgtttgaaacgcgcctgaataatatgctgtcgcgccgcgatcacctggaaaacttcgttaagagcctggaagctaatccgaaacagttcccggattttggcccacgtctggcggaaatcaaagcgcaaaccctgattgtctgggggcgcaacgaccgctttgtgccgatggatgcgggtctgcgtctgctgtccggcattgccggttctgaactgcatatcttccgcgactgtggtcattgggcgcagtgggaacatgccgacgctttcaatcaactggtgctgaatttcctcgcacgtgcttaaggaacggtcatgacgaagcatactcttgagcaactggcggcggatttacgccgcgccgcagagcagggcgaagcgattgcgccgctgcgcgatctgattggtatcgataacgctgaagcggcctacgccattcagcacataaatgtgcaatatgacgttgcgcaggggcgtcgcgtggtggggcgtaaagtgggcctgacacatccgaaagtgcagcaacaactgggcgttgatcaaccggatttcgggacattatttgccgacatgtgttatggcgataacgaaatcattcctttttcccgtgttctgcaaccccgcattgaagcggagatcgcactggtgttgaaccgcgatttacccgcaactgatatcaccttcgacgaattgtataacgccattgaatgggtacttccggcgctggaggtggtgggtagccgcattcgcgactggtcgattcagtttgtcgataccgtggcagataacgcttcctgcggggtgtatgtcatcggcggtccggcgcaacgtccggcggggttagacctgaaaaactgcgccatgaagatgacgcgtaataacgaagaggtttccagcgggcgcggcagcgaatgcctgggacatccgcttaatgccgccgtctggctggcacgcaaaatggccagtctgggtgaaccgctgcgcgccggagatatcattcttaccggggcattaggtccgatggtggcagtgaatgcgggcgatcgttttgaagcccatattgaaggcataggttcagttgctgcggcattttcaagcgcagccccaaaaggaagtctgtcatgagtaagcgtaaagtcgccattatcggttctggcaacattggcaccgatctgatgattaaaattttgcgtcacgatcagcatctggagatggcggtgatggtcggcattgatcctcagtccgacggtctggcgcgtgccagacgtatgggcgtcgccaccacccatgaaggggtgatcgggctgatgaacatgcctgaatttgctgatatcgacattgtatttgatgcgaccagcgccggtgctcatgtgaaaaacgatgcggctttgcgcgaagcgaaaccggatattcgcttaattgacctgacgcctgctgccatcggcccttactgcgtgccggtggttaacctcgaggagaacgtcgatcaactgaacgtcaacatggtcacctgcggcggccaggccaccattccaatggtggcggcagtttcacgcgtggtgcgtgttcattacgccgaaattatcgcttctatcgccagtaaatctgccggacctggcacgcgtgccaatatcgatgaatttacggaaaccacttcgcgagccattgaagtggtgggcggcgcggcaaaagggaaggcgattatcgtgcttaacccagcagagccaccgttgatgatgcgtgacacggtgtatgtattgagcgacgaagcttcacaagatgatatcgaagcctcaatcaatgaaatggctgaggcggtgcaggcttacgtaccgggatatcgcctgaaacagcgcgtgcagtttgaagttatcccgcaggataaaccggttaatttgccgggcgtagggcagttctccgggctgaaaacggcggtctggctggaagtcgaaggcgcagcgcattatctgcctgcctatgcgggcaacctcgacattatgacttccagtgcgctggcgacagcagaaaaaatggcncagtcactggcgcgcaaggcaggagaagcggcatgaacggtaaaaaactttatatctcggacgtcacgttgcgtgacggtatgcacgccattcgtcatcagtattcgctggtaaacgttcgccagattgccaaagcactggacgatgcccgcgtggattcgattgaagtggcccacggcgacggtttgcaggggtccagctttaactatggtttcggcgcacatagcgaccttgaatggattgaagcagcggcggatgtggtgaagcacgccaaaatcgcgacgttgttgctgccaggaatcggcactattcacgatctgaaaaatgcctggcaggctggcgcgcgggtggttcgtgtggctacgcactgtaccgaagctgatgtttccgcccagcatattcagtatgcccgcgagctcggaatggacaccgttggttttctgatgatgagccatatgaccacgccggagaatctcgcaaagcaggcaaagctgatggaaggctacggtgcgacctgtatttatgtggtggattctggcggtgcgatgaacatgagcgatatccgtgaccgtttccgcgccctgaaagcagtgctgaaaccagaaacgcaaaccggcatgcacgctcaccataacctgagtcttggcgtggcgaactctatcgcggcggnggaagagggctgcgaccgaatcgacgccagcctcgcgggaatgggagcgggcgcaggtaacgcgccgctggaagtatttattgccgccgtggataaactggggtggcagcatggggccgatctctatgcgttaatggatgctgctgacgacctggtgcgtccgttgcaggatcgaccggtacgagtcgatcgcgaaacgctggcgctgggatacgctggtgtttactccagcttcctgcgtcactgtgaaacggcggcggcgcgttatggcttaagcgcggtggatattctcgttgagctgggcaaacgccggatggttggcggccaggaggatatgatcgtcgacgtggcgctggatctgcgcaacaacaaataatattgactgccgagaacgtgcattttgtatgcccatcccagcacgactgccggatgcgnngtgaacgccttatccggcctacggatggcgcgagaatntnnagnccnnannnnnnnnnntagcgtcgcatcaggcatctgcgcacgactgccggatgcggcgtaaacgccttatccggcctacggannnnnnnnnnnnttgtaggcctgataagacgcgttagcgtcgcatcaggcatctgcgcacgactgccggnngcggcgtgnncgccttatccggcctacggatggcgcgagaatttgtaggcctgataagacgcgcaagcgtcgcatcaggcatctgcacacgactgccggatgcggcgtgaacgccttatccggtctacatttcgcccgtaggcagtcattaaatagttctgattacgcggctggcaatgtatcagtcgcgattcacctgcacacgcaatgaggttcatcttatgtcgactcgtaccccttcatcatcttcatcccgcctgatgctgaccatcgggctttgttttttggtcgctctgatggaagggctggatcttcaggcggctggcattgcggcgggtggcatcgcccaggctttcgcactcgataaaatgcaaatgggctggatattcagcgccggaatactcggtttactacccggcgcgttggttggcggaatgctggcggaccgttatggtcgcaagcgcattttgattggctcagttgcgctgtttggtttgttctcgctggcaacggcgattgcctgggatttcccctcactggtctttgcgcggctgatgaccggtgtcgggctgggggcggcgttgccgaatcttatcgccctgacgtctgaagccgcgggtccacgttttcgtgggacggcagtgagcctgatgtattgcggtgttcccattggcgcggcgctggcggcgacactgggtttcgcgggggcaaacttagcatggcaaacggtgttttgggtaggtggtgtggtgccgttgattctggtgccgctattaatgcgctggctgccggagtcggcggttttcgctggcgaaaaacaggctgcgccaccactgcgtgcgttatttgcgccagaaacggcaaccgcgacgctgctgctgtggctgtgttatttcttcactctgctggtggtttacatgttgatcaactggctaccgctgcttttggtggagcaaggattccagccatcgcaggcggcaggggtgatgtttgcactgcaaatgggtgcggcgagcgggacgttaatgttgggcgcattgatggataagctgcgtccagtaaccatgtcgctactgatttatagcggcatgttagcttcgctgctggcgcttggaacggtgtcgtcatttaacggtatgttgctggcgggatttgtcgcggggttgtttgcgacaggtgggcaaagcgttttgtatgccctggcaccgttgttttacagttcgcagatccgcgcaacaggtgtgggaacagccgtggcggtagggcgtctgggggctatgagcggtccgttactggccgggaaaatgctggcattaggcactggcacggtcggcgtaatggccgcttctgcaccgggtattcttgttgctgggttggcggtgtttattttgatgagtcggagattaagaatgcagccgtgtgccgatgcctgacgcgccttattaagcaggggcgaaagggacttgcccccaatacacccacggcgtttacaggtatactcgctaaaaattattcagcgggtttggaaacaaagatggcaaaacttaccttacaagagcagttgctcaaagcaggattagtcaccagcaaaaaagcggcgaaggtcgagagaacggcgaaaaaatnnnncgttcaggcgcgtgaagctcgggcggcggtagaagaaaataaaaaggcacagcttgagcgtgataaacagcttagcgaacagcaaaaacaagcggcgttggcgaaagaatataaagctcaggtgaagcagcttattgaaatgaaccggatcaccattgccaatggcgatattggttttaacttcactgatggcaatctgattaagaagatttttgtcgataagctcacacaggcgcagttgattaatggtcgtctggcgattgcccgcttgttggtcgataacaatagcgaaggtgaatacgccattattcccgccagcgttgccgataaaattgctcagcgtgatgccagcagtattgtgttgcacagcgcgctcagtgccgaagagcaggatgaagacgacccgtatgccgacttcaaagtgcctgatgatttgatgtggtaaacatagataagtcgtgcgcagatgcctgatgcgacgctatgcgcgtcttatcatgcctacggcctgcgggcgaaatgtaggcggataaggcgttcacgccgcatccggcagtcgtgcactattatcaacgcatattcagtttattggcgtggtaggcaatatgctcgccaataaaactggagacaaaataatagctgtggtcgtaaccctcgtgataacggattaacgttttgatattcatctcctggcagatcttttcaagattttgagtccgcagctgttccgcgtaaaaatcatcactcaacccctgatcaaccatgatttccgcaacgcgttgaccttgtgaaataagactcaccggatcgtaatccaaccaggcctctttattttcaccaagatatgcggcaaaggcttgctgtccccacggtacttgcgatggggagacaatgggcgaaaacgccgagacgctgacatattcatctgggttacgtaacgccagcaccagcgcgcccagtccgcccatagaatgaccagagatagactttttggccgttgccggaaaatgattcatcactaaatccggcagctcgttgcggatatagtcatacattttgtaatgttcattccacggcgcttgcgtcgcgttcaggtaaaacccggcaccttgcccgagatcgtaacggtcggcatctgcgacatgactgcctcgcggactggtgtccggcgcaacaacaataatgttgtgctcagccgcgtaacgctgcacccccgatttagtaatgaaattctgctcattgcaggtcaggcccgaaagccagtacagcaccggtaatttttcacctgcagcttttggtgggagatagacgccgacattcatttcacatttcagtgatgcggaataatgccgatacacattttgccagccgccaaagctggcatgtttttcaatgagttccatcagtcattatctcacggttaatcccccggacggctgcccggagagagtattaagaaccccgtctgaagtggacggggtaaaccagcgggaaatcagtaacgaattacggttcgaatggatttgccttcatgcatcaggtcgaaggcgtcattaatttcatccaggctcatggtatgcgtgacaaacggttccagatcgatatcacctttcatcgcatcttcaaccatacccggtaactgggaacgacctttcacgccgccaaacgcggaacctttccatacgcgaccagtgaccaactggaatggacgggtggagatttcctgaccggaacccgcgaccccnnnnnnnnnnnnnnnnnnnnnnnnnnnnngcgcactttccagcgccgcacgcatcacgttgacattaccgatgcattcaaaggtatggtcgataccccatttgttgatatccagcaggacatctttaatcggtttgtcgtagtcattcgggttaatgcagtcggtggcaccgaagcgacgcgccagatcgaatttcttcgggttggtatcgatagcgataatccgtcccgctttcgcctgacgcgcgccctgaaccactgccagaccaatcgcgccaagaccaaacacagcaacagaatcccctggctggactttagctgtgttgtgtaccgcgccaataccggtggtcacgccacagcccagcaggcagacgtgttcatggtttgcttctggattaatttttgccagagacacttccgcgactacggtgtattcactgaatgtagaacaccccatgtagtgataaagcggctgcccattgtaagaaaaacgggtggtgccgtctggcatcaggcctttaccctgggtttcgcgaaccgcaacacagaggttagttttgccagaacgacagaactcacactcgccgcactctgcggtgtaaagcgggatcacatggtcgcctggtttgacgctggttacgccttcaccgacttcaaccacaacgccagccccttcgtgaccgagaaccaccgggaatacaccttccgggtcatcgccggagagggtaaatgcgtcggtatggcaaacgccggtatgggtgactttaatcagcacttcaccttttttcggtggtgcaacgtcaatttcaacgatttccagcggtttaccgggagcaaatgcaacggcagcacgtgatttcatctctcgctcttcctcaatatggtaatagattcagctatttaagataggcacgaaccagttcaatagtgtcgtcaacggattggctgacttcgcggctgtagcagtcatttcggtcaaacgtttcccggatatggctttcaagcacttctgccatcagcccattagccgcgccccgaacggcagcgatctgttggagtatggcacggcattcggcatcaccctccagcgaccgttccagagcatcaatctgccctcgaatacgacgaactcgagtaaggacctttttcttctcttccggagtactgggcatttcgcacctcatcatctgcacgcaatatactataggggggtatgctatatgtcaatgcatacccccctatagtatataacaatggagaataattgttgtccgaagcctaaccaggtgaacggtccctcaagacagatggggaccgtttatgtgctatttttatgccgcatccgctaaaacaaacatcccgtaaggatggatttcgaggtaatagtgctcaccaatatcgggctgtaaacgggtggcgtttacttgtaataaaatctcctgtccatgccactctacggtcacttcgtactgcggccccatgtaggcgacatggcgaataacacaacgctgactctcttcgccgtgattgcttaaggtgatggcttccgggcgaacgccgacggtgccgctaccttgcaccgggaaatgcgccgnncgcggcaggcgataaccgtagatatcgacatactcttcgctaaagttcgccgggaacaggttggcgtcgcccataaaacttgccataaagcgggaggctggctgacgatagagatcctgcggtgagccaatctgcatgatgtgacctttattcatcaccagcacagtgtcggaaaccgcgaaggcctcactttgatcgtgagtcacgtagagcgacgtgatattaaactgcttttgcagctcgcggatcttatcgcgcatgctgcggcgcaggttggcatcgaggttacttaacggctcatcaaacagcagcacctttggtttgaggatcaacgcgcgggnnnnnnnnncgcgctgttgctgaccaccggaaatctggtcgacatagcggtcctcgaacccttccanatccaccnttgccagcgcctctttcacccgctgctttacttcgctacgcgacacgccgagcatctttaacccgtagccgacgttttcgcccagcgacatatgcgggaacagagcgtatgactgaaacaccatgcagatatcgcgctgctgaatggaacgatgcgtgacatcttcgccatcaataaagatttgcccttcactcggtttttccagcccggcaaccagacgcaaaatggtggttttgccgcagccggaagggccaagcagcgtcaccatttgcccttgtgggatggtgagattgatattgtcgataaccgtattactgccgaatcgtttagtgacgttgcgcagttccacaaaatttttctgactcatagtgcgctccattacgcctggtttttggctttagaacgggagatacgtgcttctccgatcagccagtcaaagaggaaaataatcgccagcatcaccacgatcagaatcgaaccataggcgatggctacgccatattcgccgtcttcaacgcggttaagaatgtaggcggttgccacgcgggtgtccggcgtgacgagaaagacgatggcgctgaccgtcgtgatggcccgcacaaagctgtagatcagggccgagagaatggccggacgcagcagcggcagtaaaatgtgggttatggttcgcaaggaacccgcgcgcaggctgagtgaggcttcatccagcgatttgtcgatctgccccaggcctgcaatcccggcgcgaatacccaccggaacgttacgcatcaccatcgagataatcacaattgccgccgttccggtgagataaaccggagcgctgttaaaggcaagaatatacgaaacgcccgccaccgtacccggtacggcaaagcacagcatggtggtgaactcgatggtctttttgcctttgaattgttgacgcaccaccacccaggcgatgagcaggccaaagatagcggtaatgggagcggcaatcccggcgtagagcagagtatccagcagtgaaggccacgcgccgtcgctcattccctgaccaaatagcttgataaagttatccagcgtcagggtgtagtccacgccccagttcaccgtgaagctgccgtagaaaatgctgccgtagagcagggcgttaaaggcaatccatatcgcaagtatggcgaccacgctccacaccagggtgaccggaagcggctggacgtcgccacggtaggatttgccggaaaccgtgacgtaagagcgtttaccaatccacatatactgtatgcagaacaccagcagcgagaacagcagcaggaaagcgccaagggtgctggcggcctgataatccagctgcgagccagtaatatagaagtaaatttgcgtcgccagtacgtcgaagttaccgccaagtaccagcgggttactgaaatcagccagtgactgtaccacgacgattaaaaaggcattggcgagcgcgggcttcaacaacggcacaaacacgccgttaaaggtttgccagcggctggcgcgcagggtgtaggaggcctcttccagcgagggatgaatggttttaatggccccgtcgaggatcataaatgccattggcgtgaatgccagaacctgtgccagccagatcccggtaaaaccgtacagccagttggtgttggtcagcccaaaccactccaccataaattccgtaacatagccggaacgccccatcatgagcgtcacgcctaagccgaccacaaacggtggcgtaacgatgggcaaaatggaaaagatgcgaccaataatggcgctgcgtttagcgatgcgcgtggtataaatcgccagcaccaggccgaagaaagtacagcctatccccaccgctatcgacaagacgatagagttgacgatcacctgaacaatatgtgcctgcgagagcacggtcataaacgccagcggggcgagctctcccgcgtcgttggtgaacatcgggataaaaatggcgatgctcggccagacgataaaaatgccaatcagcgccacaatcgcaatcagtgagccgatcacgaagcggtcgccgcccagccattcgaggcgggttaaggccagcgtcataatcgcgcctagttcgacaaacagcacgatggcggcgtagcctaaaccgcgtccagccacggtggcgctgatgacgataaacgccatacagagcaatgcccagccggcatcgaaataatgacgactacgctgttcgcgcgtggcctgacgaaacgggcggaccagcaacaggctcgggagtaaataccacagccagctgatattaaaatgcgaccagccgtacgccccgaggatctcatcactcgtggattccagcaggccataatcgaggctccagctcggcaacaggacaaatgccagccagcccagcaaaacccaaaggaaaatcgcatcccgctttttcacgggatggagtgcaagtgtctgtgacatagcagttccggtatggttggccggggcaggcgtctgcgctgcacccggcaaatgcgcctaatgcgggtttatttacccatcttcacttcgctgacccatttattaatcaatgccttacgaacatccgtggaaccatatttatccatgtcgtagttgattaatttcaggtcgtcgagcttcagcgaatttggcgacgtttcggcggtggtattagtcaggatctgataagacttccctttcttccacgccagttcctgagcttcttttgataatacccagtccacaaacagtttggcgttgtcgaggttgcgcgcgcctttcagaatgctgacgccgccaatttcgtagcccgtaccttcacacggggaaatcaactccagcggcgcgccctgttctttttccagcgagtagtcatgcaggaagccaataccaatcgccgtttcgccacgggcggcgttacgtgccggggctatgcctgatttggtgtactgagagacgttggcgttcagttgttttagataatcaaaggcctgatcttccccccacagctgcgcaaaagtagccagggcggtgtaggcagtaccggaactttgcggatcggcaatttgaatttcgcctttatattccggtttggtgagatctttccagcacttcggcaccggcaggtttttctctttcagacgatcggtgtttacgccaaaaccgaggatccccacataaacggcagaggacagattccctttcacttttgccggatcgcggaatttctccatgatctgctcaaggttaggggatttatacgcctgtagcaggcccatctcgccagcctgcgattgcgggtctaaagtgccgccgtaccagacgtcagcctgggggtttttcttttcagcatcgacttttgccagggtgcttccggaaccgttgcggataaacgaggtttttacatcatatttctcgccaaacgctttggtttcggcctcacacatttcattggtggcgctgcaatagaccaccagccggccttttgcctgcgcggcacccgttaaagtcgccagcgcaacggcagaagcaatcagagtagaggtaaaggtcattttcattgttttatccttcgagcgtgagtggtggtgatgcccgccatcagtaacggcatcagcagtaaacccataagtactgcggcgaccgagagtaaactgaacattcccggccagccgtagcgttcgatgaccagcgacagcggccagcctgccagcgccgcgccaaggtaagcgaacaggccgagaaatccggtgattgaacccgccgcagctttgtgcccacactccaccgccgcaagtccaatcagcatttgtgggccaaagacgaaaaagcccacggtaaaaaagcacactgccagcagagcgtagtgatgaaccggtgccagccacagtgcggcgactgacaccatcaaccccaacgtgaacagcaaaatcattggcgctcgttgcccgctaaacagcaaatccgatccccatccggcaaataacgcgccgagtaagccgcccacttcaaacagcattaccgtggcgttggcgctgagcaggttgacaccgtggctttccgtcagccagatattgccccagtcgttaagcgcaatccggatcacataaaccagtacatatgagacgcccagtagccagatcagcggattttgcagcatggtggtgcgcaacatttgccacagccccatcggcggactttgttgttcctgacgtaactccagcggatcgtgacgccagtgaccaactgtcggtaatccctcttcctggggcgtgcctttgagttgtagcgttaaccagatccctaatgccatgctgattatccccggtgtcagcatcgcggcctgccagccccaccagtgggcggcaaaggcgctaatcagcggaataatcgctccgccaatgttgatcgacatattccagcagccccaccagaaaccgcgctcattgcgtgagtaccagtgggtcagcaagcgggcacacggtggccatccccagccctgaaaaaaaccgttcagtgtccagaccacaagcagaagcgtaagtgattcgccaaaggcaaacaccacgttcaataacccggtggcgaacaagccgacgcccataaaaccgcgttgtccgtggctgtcatgccacagtccggcggtaaatttcgacaatccgtagctgagataaaacagcgaacccagcaggccaatgtcgcctttatccagtccgaggtcggtttgtagcgccggaaggacgtaattcacgctttttcgcgtcagataaaatgcggcgtagccaataatcatgcacatcagcaatcgcggacgtaatgtccggtagcattgattaatttctctcgctgaacgcgcgtgcatggttgtctccatgttgctgactatatgaaaatgaaagtgaaaggggatgagagaaaatccgggatacctaagactttttcctggttatccggcgatttgttgcaaaaatgtgggcaagttaacaattacccgcgtgccgtgctgtttttcgagcgttaagtcgccgcccagggcgctgacgcgctcacgcatcccctgaatgccaaatccagccattttcccgctggcgatccccacaccgttgtcgctgacttccagatgcaatacctctccctgctggcgcaggataatcgtcacttcgctggcttcggcgtgtttacagatgttattgagcaactcctgcaataaccgatacaaggtaaagcgcaccgtttcgttttctggtgtggagttcagttgataggcaaactggcaatgaatgccgcgttcactaaaggcaaattcattaatcagatgcagcaacgcttcgcgaaatgtcagttcatcaagcgcgggaggccgcaactggcgcagcaattggcgggtggagagatgaatgcggcgggcgagctcattgatttggctggctgcggattgaatttgcgccggatcacgcgcccgcttcaccagttgcgactggatctgaatggcggtgatgttctgaccgatttcgtcgtgcagctctcgcgccaggttttttcgcgtgtcctcctcggtgtggatcagcttttccgccaatgcccgccgcgctgccagctcggcctccagctgttgtcggtaatggtgcaggtttagcgccagatgttgctggcgactgatggcaatgcccaagccaattcccagcaaggcctgggtcgcgaggaaaatctccagctccaccaggttactaaagcccacgccaatctggcgggcgatggtgatcatcatgctgcccaaaagcccggagagtacgccaccttgccagccaaatttccacgccatcaccacattgggcaaaaagaccacgatcaacagcagacgttcaatttcaggtgacagcaccatctgagtgccgataccaataataaaaaacaggctacaccagatgattaaagaggtacgcaaggggggattatgcgtatcgagtcccaggagctggtagcgatgctgctggcgcagaaactcaaagataagatagacaaacggcgtcagtaatacgccgccggtaaatgaggtcaaacccggtagcattattgggcctgacataaaaggggagagcagggcggtattcaacaatgaagctgccgtgacagtggctaacagcaacgtcagacgctgccagtaaagtggaaaacggtgccagaagttttgcgcaaggagggcaggaaacaggctaataaccggcgttgccagcatgagataaccgttcaatagctgttcactatggagccagaacatcatcagcaaaggggggagcaccaacgcaggccagtagcggcgagagagcaaaataacaagggcgagataaactccctgcgggagaaacaacaccgcctgttgaccgttattggtcagataaaagctgagcgtccacagcatcagccagccggttccccaggctagcacaataaacagcaaaatcacccaatgacgaagattgcgcgacattaatgccccgccaacagatggtggtcgagcgcaaaatgtaccagttcaatggtgctatggcagttcagttttcccagcacattggcgcgatgcacatgtaccgttttatgactgagttcgagtttaaaggcgatctctttaacgctgtctcctttgaccagtaactcaaacacttcacgttctcgtggggtgagaatttccagcgcctgggcgggttgcccgccgccgcgtaaagcccgaatcgcatcggcacagagataatgcccgcccagcccgaccgagcgcaccgcctgtactaactcttccggcccacagcgtttggttaaatacccgctggcaccggcatccagcgcgctttgcacaaaggttggtgcgtcataaatgctaagaataatggcgcgaaattgcggtttttgtgcacgcaggcgcttaagcaaactgaggccgttttcgtccggcatggcaatatcaatgacggcaacattgacgtcatcacggattaatgccgaccatgcctgcgcggcactactgtactgaccaatgacctccagatcgtcttccagagagagtaattgtgcgaagccagagcgcaccacaacatggtcatccaccagcactacccgaatcatacttttcttctcttattatctaattctcctatcatgcatcacggcgcggcgctggcaatcaaccagcgacagatatggaatggatgtaacaaaatggcaataatttgccggagcgcgcacatcttatctggcttgtgaaccggcgggatacgttcgccaaaaccgcaaaatgcgcaaactcgctaaccattgccgatttttttctnnaaacgctttgttcttaacaagaccttttaattcctttatcaaactgacccgcaacgaaatactgctcccataacaagacaggggagcagacaatcatggcaatttcatcgcgtaacactcttcttgccgcactggcattcatcgcttttcaggcgcaggcggtgaacgtcaccgtggcgtatcaaacctcagccgaaccggcgaaagtggctcaggccgataacacctttgctaaagaaagtggagcaactgtggactggcgcaagtttgacagcggagccagcatcgtgcgggcgctggcttctggcgacgtgcaaatcggcaaccttggttccagcccgttagcggttgcagccagccaacaggtgccgattgaagtcttcttgctggcgtcaaaactgggtaactccgaagcgctggtggtaaagaaaactatcagcaaaccggaagatctgattggcaaacgcatcgccgtaccgtttatctccaccacccactacagcctgctggcggcgctgaaacactggggcattaaacccgggcaagtggagattgtgaacctgcagccgcccgcgattatcgctgcctggcagcggggagatattgatggtgcttatgtctgggcaccggcggttaacgccctggaaaaagacggcaaggtgttgaccgattctgaacaggtcgggcagtggggnnnnccaacgctggacgtttgggtggtgcgcaaagattttgccgagaaacatcctgaggtcgtgaaagcgttcgctaaaagcgccatcgatgctcagcaaccgtacattgctaacccagacgtgtggctgaaacagccggaaaacatcagcaaactggcgcgtttaagcggcgtgcctgaaggtgacgttccggggctggtgaaggggaatacctatctgacgccgcagcaacaaacggcagaactgaccggaccggtgaacaaagcgatcatcgacaccgcgcagtttttgaaagagcagggcaaggtcccggctgtagcgaatgattacagccagtacgttacctcgcgcttcgtgcaataaaaggaggcgcagatgctgcaaatctctcatctttacgccgattatggcggcaaaccggtactggaagatatcaacctgacgctggaaagcggcgagctactggtggtgctggggccgtccggctgcggtaaaaccaccctgctgaatttgattgccggttttgtgccttatcagcatggcagcattcaactggcgggtaagcgtattgaggggccgggagcagagcgtggcgtagtttttcagaatgaagggctactaccgtggcgcaatgtacaggacaacgtggcgttcggcctgcaattggcaggtatagagaaaatgcagcgactggaaatcgcgcaccagatgctgaaaaaagtggggctggaaggcgcagaaaaacgctacatctggcagctttccggtggtcaacgtcagcgggtggggattgcccgcgcgctggcggcgaatccccagctgttattactcgacgaaccgtttggtgcgctggacgccttcacccgcgaccagatgcaaaccctgctgctgaaactctggcaggagacgggcaagcaggtgctgttgattacccacgatatagaagaagcggtgtttatggcgactgaactggttctgctttcacccggccctggccgcgtgctggagcggctgccgctcaactttgctcgccgctttgttgcgggagagtcgagccgcagcatcaagtccgatccacaattcatcgccatgcgcgaatatgttttaagccgcgtatttgagcaacgggaggcgttctcatgagtgtgctcattaatgaaaaactgcattcgcggcggctgaaatggcgctggccgctctcgcgtcaggtgaccttaagcattggcacgttagcggttttactcactgtatggtggacggtggcggcgctgcaactgattagcccgctgtttttgccnccnccgcaacaagtactggcaaaactgctcaccattgccggaccgcagggatttatggacgccacgctgtggcagcatctggcagccagcctgacgcgcattgtgctggcgctactcgcggcggtgttgatcggcattccggtcgggatcgccatggggctaagcccgacggtgcgcggcattctggatccgataatcgagctttatcgtccggtgccgccgctagcttatttgccgctgatggtgatctggtttggtattggtgaaacctcgaagatcttactgatctatttagcgatttttgcaccggtggcgatgtcggcgctggcgggggtgaaaagcgcgcagcaggttcgcattcgtgctgcccagtcgctgggtgccagccgtgcgcaggtgctgtggtttgtcattttgcccggcgcgctgccggaaatcctcaccggattacgtattggtctgggtgtgggctggtctacgctggtggcggcggagctgattgccgcgacgcgcggtttaggatttatggttcagtcagcgggtgaatttctcgcgactgacgtggtgctggcggggatcgcggtgattgcgattatcgcctttcttttagaactgggtctgcgcgcgttacagcgccgcctgacgccctggcatggagaagtacaatgagtgaacgtctgagcattaccccgctggggccgtatatcggagcacaaatttcgggtgccgacctgacgcgcccgttaagcgataatcagtttgaacaactttaccatgcggtactgcgccatcaggtggtgtttctgcgcgatcaagccattacgccgcagcagcaacgcgcgctggcccagcgttttggcgaactgcatattcaccctgtttaccctcatgccgaagggggtgacgagatcatcgtgctggatacccataacgataatccgccagataacgacaactggcataccgatgtgacatttattgaaacgccacccgcaggggcgattctggcagcgaaagagttaccttcgaccggcggcgatacgctctggaccagcggtattgcggcctatgaggcgctctctgttcccttccgccagctgctgagcgggctgcgtgcggagcatgattttcgtaaatcgttcccggaatacaaataccgcaaaaccgaagaggaacatcaacgctggcgcgaggcggttgcgaaaaatccgccgttgctacatccggtggtgcgaacgcatccggtgagcggtaaacaggcgctgtttgtgaatgaaggctttactacgcgaattgttgatgtcagcgagaaagagagcgaagccttgttaggctttttattcgcccatatcactaaaccggagtttcaggtgcgctggcgctggcaaccgaatgatattgcgatttgggataaccgtgtgactcagcactatgccaatgccgattacctgccacagcggcggattatgcatcgggcgacgattcttggggataaaccgttttatcgggcggggtaatacgagagtggacggtcctctcgcccccttggggagagggttagggtgagggggcgttcaccgtgctttcaacaggttaactccccctttctgagaggaaacaaaattaacgcagaatcttcttctcagccaaatccagcgcaaagtagctgaaaatcagatccgcacccgcacgnttaatcgaacctaagctttcgagcacgactttctcttcatctatagcacccgccagcgcggcgaacttaatcatcgcatactcaccgctcacctgatacgcgccaatcggcaattcagtacgttcacgcagctcacgcacgatgtcgaggtacgctccagcaggtttaaccatcaggcagtctgcgccctgggcttcatccagcagtgactcacgaatcgcctcacgacggttcattgggttcatctgatagcttttgcggtcgccttttaatgcgcttccggcagcttcacggaacggaccataaaaggaggaggcgaacttggtcgaatacgacataatcgccgtatctttaaagccagcagcgtccagcgcctggcgaatcgcctgtacctggccatccatcgcggcggaaggggcgatgaagtctgcacctgcagcagctgcaaccacggcttgcttgcctaaattttccagagtcgcgtcgttgtcgacgccatgctcgcacagcacaccgcagtgaccgtgagaagtgtattcacagaagcaggtgtctgacatgacaatcatttctggcaccgtctgcttgcagatgcgcgacatacgcgctaccagtccatcttcccgccaggcatcgctgccggtttcatcggtatggtgagagatgccgaaagtcatcacggaacgaataccggcgttggcgatgcgttcaatttcgcgtgccagatgtttctctggaatgcgcatcacgccaggcatggcttcaacggctttgtagtcgtcaatttcttcttcaacaaagatcggcaacaccaggtcgttaaggctaagtgttgtctcttcaaacatagcgcgcagcgcaggagatttgcgcaggcgacgagggcgttggattaagtctgtcatggtctgcctgatgtttgtggaattaaggtgcacagtatacctgaagcggggcaggagtgttttacgaaagttgtcacgatgttgacaagaagagaatgaaagagagaccagggcatctttgtaatagaaatagcaataacttcatattcactgaaaatattttttaatttttatttataggtgctggttattatttttgccaatttggttgaactgtcaaaaattgaattacttaaagttcattgcttattgataaattatttgtctgatttgttgttttggtatttttaggatctataattcaaaattaatgatttcattaacgtgttgaaatgcagtgtttttgtcaacttattctttgtgcgtatagatatttttatatatgtccgcaatcggacttaggggaaagaataattgaaccattcctctataacgccgcataatcgtcaacgcgaaacataagatgttttctatgcattgataattgatggatcaacttattacgtccctgaggagggatgacaaatgcactcctggaaaaagaaacttgtagtatcacaattagcattggcttgcactctggctatcacctctcaggctaatgcagcgaccaacgatatttctggtcaaacttacaatactttccatcactacaacgacgccacctatgctgatgacgtttactatgatggttatgtaggctggaacaactatgccgctgatagctattacaacggcgatatctacccggtcattaataacgctaccgttaacggcgtgatttctacctactatctggacgacggtatttctaccaataccaacgccaatagtctgacaatcaaaaacagcactattcacggtatgattacctctgagtgcatgactactgattgtgctgatgaccgtgctactggttatgtttatgatcgtctgacactgagcgttgataattcaacgatcgatgacaactacgagcattatacttacaacggtacctataataatgccgctgacactcatgttgtagatgtttacgatatgggtactgctattacactggatcaggaagttgatctgtccatcactaataactctcatgtagcaggtattacgctgactcagggttatgagtgggaagatattgacgacaacacagtcagcactggcgtaaacagcagcgaagtgtttaataacactattactgttaaagattctactgtgacctctggttcatggactgatgaaggtactactggttggtttggccatactggtaatgccagcaactatagcaacacgctgactgcagacgatgttgcaattgccgcaatcgcaaatccgtatgctgataatgcgatgcagactacagtaactttagacaactcaacactgatgggtgatgttgttttctccagtaatttcgatgaaaacttcttcccgcaaggtgctgacagctatcgcgatgctgatggtgatgtagataccaacggttgggatggcacagaccgtatggatgtgactctgaacaacggcagcaagtgggttggcgctgcaatgtctgttcatatggttgatgaagatggtgatggttcttacgacggatatgctgttggtactgaagcaactgcaactctgctcgatattgcagctaacagcctgtggccttcatcaactgtcggtgttgataacatcaatactcaatatgacgaaaatggccatatcgtaggaaacgaagtttaccagagcggtttgtttaatgtgactttgaacggtggttcagagtgggatacaacaaaatcttctctgattgatactttaagtattaacagcggttcccaggttaatgttgcagactctcgtctgatctctgacactgtctctctgactggcggttctaacctgaacatcggtgaagacggtcatgtagcgactaataccctgaccatcgacaatagtaccgttaaaatgtctgatgatgtttctgcgggctggggtttagaagatgctgcactgtacgcaaataccatcaccgtaactaacgacggtctgttggatattaacgttgatcagttcgatgctaacccgttccaggccgataccctgaatctgaccagtaccactgatactaacggcaacattcacgctggtgtattcgatatccatagcagtgattacgtaatggataccgatctggtcaacgatcgtaccaacgatactaccaagtcaaactacggttatggcttaatcgcaatgaactctgatggtcacctgactattaacggtaacggcgataacgacaacactgcttctatcgaagctggtcagaacgaagttgataacaacggtgaccatgttgcagccgcgaccggtaactacaaagttcgtatcgacaacgctactggtgctggttctatcgctgactacaacggcaacgagctgatctacgtcaacgacaaaaacagcaacgcgaccttctctgctgctaacaaagctgacctgggtgcatacacctatcaggctgaacagcgcggtaacaccgttgttctgcaacagatggagttgaccgactacgctaacatggcgctgagcatcccatctgcgaacaccaatatctggaacctggaacaagacaccgttggtactcgtttgaccaactctcgtcatggcctggctgataacggcggcgcatgggtaagctacttcggtggtaacttcaacggcgacaacggcaccatcaactatgatcaggatgttaacggcatcatggtcggtgttgataccaaaattgacggtaacaacgctaagtggatcgtcggtgcggctgcaggcttcgctaaaggtgacatgaatgaccgttctggtcaggtggatcaagacagccagactgcctacatctactcttctgctcacttcgcgaacaacgtctttgttgatggtagcttgagctactctcacttcaacaacgacctgtctgcaaccatgagcaacggtacttacgttgacggtagcaccaactccgacgcttggggcttcggtttgaaagccggttacgacttcaaactgggtgatgctggttacgtgactccttacgncagcatttctggtctgttccagtctggtgatgactaccagctgagcaacgacatgaaagttgacggtcagtcttacgacagcatgcgttatgaactgggtgtagatgcaggttataccttcacctacagcgaagatcaggctctgactccgtacttcaaactggcttacgtctacgacgactctaacaacgataacgatgtgaacggtgattccatcgataacggtactgaagggtctgcggtacgtgttggtctgggtactcagttcagcttcaccaagaacttcagcgcctataccgatgctaactacctcggtggtggtgacgtagatcaagactggtccgcgaacgtgggtgttaaatatacctggtaatattcttcactccgaagaaatactggtaatttaatctaaataatgcccgtcaaggatttgacgggcattactgcaaaggacgcgcaaatgttatctgtagttaaacctcttcaggaatttggtaagctcgataaatgtttgtccagatacggtacgcgcttcgagtttaataatgaaaagcaagttatattttccagtgatgtcaataacgaagatactttcgttattttagagggagttatctctctgcgtagagaagaaaacgtacttatcggtattacccaggctccttatattatggggctggctgatggtttaatgaaaaacgatataccatacaaattaatatcagaaggaatttgtacgggatatcatctaccagccaaacaaaccattacgcttattgaacaaaatcaactctggcgagacgctttttactggttagcctggcaaaatagaattctggaattacgcgacgtgcagctcattgggcataattcctacgaacaaatccgcgcaacattattatcaatgattgactggaatgaagaattgcgatcacgtattggtgtgatgaattatatccatcaacgtacacgcatatcgcgttctgtcgtcgcagaagttctcgctgctttgcgtaaaggcggctatatcgaaatgaataaaggcaaactggtcgctatcaaccgtttgccttcagagtattaatcaggatgcggggataaccaacggtttattcccgcttagctcggtcaccagatcattgatgccatcgctcatatttttaaagcgcgtcaacggcgaacgagtgaccaccacaaacgcgccaatattcttctgcgggatcatcgccatataggtaatgaaaccgccaccaccacctgtcttctgaataatccccggacgaccctctttcggggccatatatacccagcctaaaccaagcgcatccgctttgccggggacatccatgccaatcactttcgtaaactgcnnncgctgataaatcaacgtctgcatgcgatctgcctggttactgcgctgataaaaatcagatgacaaatactgctgcatccagcgcatcatatcgccaggcgtggaatagacgccgccgctgccaattgccgccagcgtgttattgcacggactggcaccgcgctcagcaaccattaaacggcggcactgatccggtgagggagtgtaggtggtgtctttcatccccaatggacgggtaatctgctcttcaaacaactgggtataaggcttgccggacgcattcgccagtgcatctgccagcaggtcgaacgcaaggttagagtacgccgcctgactgcctggcgcggctttcagcttcgccgtagaaaggtatttccagcgttgctcgcgcgttggccagacaaacaccggacgatgtgccgcgccaccgggctgttcacggggcagggcgctggtatgggttgccagattgaccagcgtaatgggcgtcccattgtaggttggcacgcgtgcgcctggcggagcatatttacttagcggatcgtttaacttcacggtcccctggtcgagcaatttcaccagcatctcactggtcattagcttggtgagggaagcaatacgcacgaccgaatccagctgcgggcgaacgttattaccaggtcgcgtttcgccataactgcgaaagacgcgctggttaccgtcgataacaaccagcgccatccccgtggcaccgctgccgtaaaaaatatgatcggcataacgatcgacaatatcagaggcaaactccggttcagtgatcggctgcgccgcatggacggaggtcaatgacgccgcacacagcacggcagaaaaaagcagactacgtttcaacggtggtgtccataaattgaatgaaggtaactgagcgtatttatactactcattgatggattgcaaagggcgaattagtgcaataatagtgttaaaaacgtaacggcgcgtaaacgcgatctttttcctgctcaccaatgcctgcatttgtgatcctgcgcgtgttaatccgcttatgtaaacaatctttggtttgtgaaatccgtcgaaacaattcttatggccaggctggcgaactaagcgccttgctatgagtcacaatgggcggtttcatttggctgacgctttgtagcggtcatgcggttaatacacagcagttgttaaaacgataagaagttagcaggagtgcatatgtttaagtcttttttcccaaagccgggaacgttttttctctcggcctttgtttgggcattgattgccgttatcttctggcaagccggtgggggggactgggtggcgcgtatcaccggcgcttccgggcagatcccgattagcgccnngcgtttctggtcgttggatttcctgattttttacgcttactacattgtttgcgtaggactttttgcattgttctggtttatctacagcccgcaccgttggcaatactggtcaatactcggtactgcactgatcatcttcgtcacctggtttttggtggaagtcggggttgccgtcaacgcctggtatgcaccgttctatgatctgattcaaaccgcgctaagttcgccgcataaagtcactatcgaacaattttaccgcgaagtgggcgtctttctggggattgcgctgatcgcggtagtgatcagtgtgctgaataacttctttgtcagtcactacgtgttccgctggcgtacggcgatgaacgaatattacatggcgaactggcaacaactgcgtcatatcgaaggcgccgcacagcgtgtgcaggaagacaccatgcgttttgcttcaacgctggagaatatgggtgtcagttttatcaacgccatcatgacgttgatcgccttcctgccggtgttggtaacgctctccgcgcatgtgccggagctgccgattatcgggcacattccgtatggtctggtgattgccgctatcgtctggtcgctgatggggaccggattgctggcagtggtagggatcaaactgccggggctggagtttaaaaaccagcgtgtagaggctgcctaccgtaaagagctggtttatggtgaagacgatgccacgcgcgcgacgccgccaacggtacgtgagctgtttagcgccgtacggaaaaactatttccgcctctattttcactatatgtatttcaacatcgctcgcattctctatttgcaggtcgataacgttttcggtttgttcttgctgtttccgtcaattgttgccggtacgattacgctcggcctgatgacgcagattaccaacgtttttggtcaggttcgcggtgctttccagtacctgattaactcatggaccacactggttgagttgatgtctatctacaaacgtctgcgcagctttgaacatgagctggatggtgacaaaattcaggaagtaacccataccttgagctaaaaaggagaagtaatgtcgcgagtcaatcatctgtcttcgctttcatttttggcggttctggttttagcggggtgtagcagtcaggcgccacagccgttgaaaaagggcgaaaaagcgatagatgtggctagcgtggtgcggcagaagatgcctgcgagcgtgaaagaccgcgatgcctgggcgaaagatctcgccaccacctttgaaagtcaggggctggcactgacgctggaaaacgtctgctcggtgctggcggtggcgcagcaggagtcaaattatcaggcagatccggccgttccgggcttaagcaagatcgcctggcaagagattgaccgtcgtgctgaacggatgcacattcctgcttttctggttcatactgcgctaaaaatcaaatcgccaaacggcaaaagttatagcgaacggctagattcggtgcgtacagaaaagcaattgagcgggatttttgacgatctgatcagcatggtgccaatggggcagacgttgtttggttcgcttaatccggtgcnnaccggtgggccgatgcaggtcagcattgcttttgccgaacagcataccaaagggtatccgtggaaaatggacggtacagtccgtcaggaagtctttagtcgccnnnncgggttgtggtttggtacttaccatttactgaattatcccgccagttatagcgcaccgatataccgttttgctgattttaacgctggctggtacgccagccgtaatgccgcgtttcagaacgcggtcagtaaggccagcggcgtgaagctggcactggacggtgatttaattcgttacgacagtaaagaacccgggaaaaccgaactggcaacgcgcaaactggcggcaaaactggggatgagcgacagcgaaattcgtcgtcagctagagaaaggtgacagcttctcttttgaggagacggcgctgtacaagaaagtttatcaacttgccgaagcgaaaacgggtaaatcactcccccgcgaaatgttgcctggcattcaactggaaagcccgaaaatcacccgcaacctgactacggcctggtttgcgaagcgcgtagacgaacggcgggcgcgttgtatgaaacagtgaacaaacaggaatgtcatgccagataaggcgttttaggccgtatctggcaacgtaaatcttactggcggcgatgtcgccagtgcagccatagcgccaccactgcaaaaatgaggcagcctactaaaaacgggatcagcccgaanntggtgccgacacctaaaccaatttccacccgtgggcgacctgtttcctggacctgcattaaacgctcatagacgccgggcgcatgcactaacaggttcagcaattgcgccccagcccaaaagcaaaacagcacaaacaacgcataggcaatgttgccaggcgttgaagaggcattgcgatattttccgctaaacagcgattttgacagggtgaaatcagccataaaaacctccggaagtcatctgcttctcttctggtgtgataccagcggcttatggcaagtctgacaggtcatttagattgtcaatatcagaatcatggtaaattgatgttgggaatattcccgaagcgtgaatcttcgttgcgagtcacaaaatagcaactttaagttaaatttattaacaattgcgaaaatgttgtctacaccacagacggttgttgcagaatatgcaaggatgttgtttttcgttaacggagcagccatgaatctgcctgtaaaaatccgccgtgactggcactactatgcgttcgccattggccttatattcattcttaatggcgtggtggggttactgggatttgaagcaaaaggttggcagacctatgccgtcggtctggtgacgtgggtgattagtttctggctggcggggttgattattcgtcgtcgcgatgaagaaactgaaaacgcccaataagaatattatcgggcgttaaaatattacattgtggttttcaatgcgttatccgcagcgtgacgctccagcgccagctcaatcaaacgtgtgatcagatcggtgtaacccagaccgctggcttgccacagcttcggatacatactgatgttggtgaagccaggcagtgtgttgatctcgttgatcaccacttcgttctctggggttaaaaacacgtctacacgcgccatgcctgcgcatcccaacgtctgataagcctgaacggcaatcgcccggatcttatcgttgatttctggcgcaatggctgccggaactaccactttcgcgccatcttcgtcaatgtacttggtgtcgtaggcatagaaatcgctggtgagtacgatctcgccacaggtgctggcttgcggattgtcgttgcccagaactgcgcattcgatctcacgacctttgatcccttgctcaacgatcactttatgatcgaactcgaacgccagatcgacggcaattgcgtattgttcttcactggttactttgctgacaccaacagaagagccctgattagccggttttacaaacagtggtaaccccagtttagcctccacttcggcaaaactgatgttgtgacgattagcgcgcgtcagggtaataaatggcgcaatgttcagcccggcatcgcgtagcagacgtttggtgacatctttatccatacaggctgctgaagccagaacatcagaacctacaaacggtaaattggcgacccgcagcattccctgcaaggaaccatcttcgcccagcgtaccgtggacaatcgggaaaatgacatccaccgtcggcaacggctgaccgttttgcgcgtcgataagctgatgctcatgtttacctggcacctgggcgaggctggtcgccgaagggcgcaacgcaatatgggcaggatcgtctgcatttagcagataattgctggcatcgctgacgtgccattgcccttgtttatcaatgcccagcagcacaacgtcgaagcgacttttatcaatggcatcgacaatgttttttgccgattgcagagacacttcatgttccgctgatttaccaccaaaaacgattcctacccgcagtttttccatcttaaaaacctatcccgtctaacacaaagtgcatacattaccacgacaaaannnggggggattcgcggccttctgaaagattgttgcaatcttctgctgacaaagcgtgcaacgtactggtgaagaaagtgcgttatctcaaagatgtgcgcaagatcacaaaaatgatgaacgggaagctaatttattcctggcttaaatggccatgcggtgagtttttttctcttaattataagttaacgaagagaatatatttcataacttttatttataataaaggttgataattaaaagcctatgttttgtgtgggtaattatttaaataagagaaacgtttcgctggtaatcaaacaaaaaatatttgcgcaaannatttcctttgtcataaaaataatacctccagacactatgaagttgtgaaacataatgttaacttctccatactttggataaggaaatacagacatgaaaaatctcattgctgagttgttatttaagcttgcccaaaaagaagaagagtcgaaagaactgtgtgcgcaggtagaagctttggagattatcgtcactgcaatgcttcgcaatatggcgcaaaatgaccaacagcggttgattgatcaggtagagggggcgctgtacgaggtaaagcccgatgccagcattcctgacgacgatacggagctgctgcgcgattacgtaaagaagttattgaagcatcctcgtcagtaaaaagttaatcttttcaacagctgtcataaagttgtcacggccgagacttatagtcgctttgtttttanntnttaatgtatttgtacatggagaaaataaagtgaaacaaagcactattgcactggcactcttaccgttactgtttacccctgtgacaaaagcccggacaccagaaatgcctgttctggaaaaccgggctgctcagggcgatattactgcacccggcggtgctcgccncttaacggctgatcagaccgccgctctgcgtgattctcttagcgataaacctgcaaaaaatattattttgctgattggcgatgggatgggggattcggaaattactgccgcacgtaattatgccgaaggtgcgggcggcttttttaaaggtatcgatgccttaccgcttaccgggcaatacactcactatgcgctgaatanaaaaaccggaaaaccggactacgtcaccgactcggctgcatcagcaaccgcctggtcaaccggtgtcaaaacctataacggcgcgctgggcgtcgatattcacgaaaaagatcacccaacgattctggaaatggcaaaagccgcaggtctggcgaccggtaacgtttctaccgcagagttgcaggatgccacgcccgccgcgctggtggcgcatgtgacctcgcgcaaatgctacggtccgagcgcgaccagtgaaaaatgtccgggtaacgctctggaaaaaggcggaaaaggatcgattaccgaacagctgcttaacgctcgtgccgacgttacgcttggcggcggcgcaaaaacctttgctgaaacggcaaccgctggtgaatggcagggaaaaacgctgcgtgaacaggcacaggcgcgtggttatcagttggtgagcgatgctgcctcactgaattcggtgacggaagcgaatcagcaaaaacccctgcttggcctgtttgctgacggcaatatgccagtgcgctggctaggaccgaaagcaacgtaccacggtaatatcgataagcccgcagtcacctgtacgcctaatccgcaacgtaatgacagtgtaccgaccctggcacagatgaccgacaaagccattgaattgttgagtaaaaatgagaaaggctttttcctgcaagttgaaggtgcgtcaatcgataaacaggatcatgctgcgaatccttgtgggcaaattggcgagacggtcgatctcgatgaagccgtacaacgggcgctggaattcgccaaaaaggatggtaacacgctggtcatagtcaccgctgatcacgcccacgccagccagattgttgcgccggataccaaagctccgggcctcacccaggcgctaaataccaaagatggcgcagtgatggtgatgagttacgggaactccgaagaggattcacaagaacataccggcagtcagttgcgtattgcggcgtatggcccgcatgccgccaatgtcgttggactgaccgaccagaccgatctcttctacaccatgaaagccgctctggggctgaaataaaaccgctcccggcagtgaattttcgctgccgggtggtttttttgctgttagcaaccagacttaatgtcagatcacgggcgcatacgctcatggttaaaacatgaagagggatggtgctatgaaaattacattactggttaccttgcttttcggtctggtttttttaaccaccgtcggcgctgccgagagaaccttaaccccacaacaacagcgtatgacctcctgtaatcagcaggcgacggcacaggcgttgaaaggggatgctcgtaagacctacatgagtgattgcctgaagaacagcaagtctgcgcctggtgaaaaaagtttgacgccacagcagcaaaagatgcgcgaatgtaataatcaagcaacgcaacaatcactgaaaggtgatgatcgtaataagtttatgagcgcctgcctcaagaaagccgcctgatacctgatagtgctaacgggtgagctactaaaatggctcacccgaaatttcatacttctgcctttagccccgtctctataatttgggaaaattgtttctgaatgttcccaaaaataatgaatgatgaaaactttttcnnaaaagcggcggcgcacggggaggaacctcctttaactcctcaaaacgaacatcagcggtccgggctgcgcttcgcccgtcgcgtcagactaccccgtgcggttggcctggctggcatgttcttaccgattgcttcaacgctggtttcacacccgccgccgggctggtggtggctggtgttggtcggctgggcgttcgtctggccgcatttagcctggcagatagcgagcagggccgtcgatccgcttagccgggaaatttacaacttaaaaaccgatgcagtattagcgggaatgtgggtaggcgtaatgggcgtaaacgtgctgccttccaccgcgatgttgatgattatgtgtctgaatttgatgggggcaggcggcccccgtctgtttgtcgcgggtctggtgttgatggtggtttcctgccttgtcaccctcgagctgacgggcattaccgtgtcgttcaatagtgcgccgttggaatggtggctctcccttcccattattgtcatttatcctctgctgtttggctgggtcagctaccagacggcaaccaaactggcggaacataaacgcaggttgcaggtcatgagtacccgcgacggcatgacgggcgtgtataaccgacgtcattgggaaactatgttacgcaatgaatttgataactgtcggcggcataatcgcgatgcaacgttactgattatcgatatcgaccatttcaagagcatcaacgatacctggggccatgatgtgggcgatgaagcgattgtggcgcttacccgacagttacaaattaccctgcgcggtagcgatgtgattggtcggtttggcggcgatgagtttgcggtaatcatgtccggtacgccagctgagagcgccattaccgccatgttacgggtgcatgaagggctaaatacattacgtttgccgaatacgccacaggtaaatttacggattagtgtgggggttgcgccgctgaacccacaaatgagtcactatcgcgagtggttgaaatcggcagatttggcgctctacaaagcaaagaaagccggacgtaaccgcaccgaagtggcggcctgacgtccggcgaaagtcatcaggatttgctgagtttttctgatttttccatacacttcgtcatcgcttcgatcactgcggcacggaagcctttctcttccagtacgcgtaccgcttcaatggtggtgcctcccggtgagcagaccatatctttcagtgcccccggatgttctcccgtttccagcaccatttttgcggaacccattaccgcctgagcggcaaatttatacgcctgggcgcgtggcatcccgcccagcacggcggcgtcggccatcgcttcgataaacataaagacgtaggctggcgaagaaccgctcacaccgaccaccgggtggatcatcggctcagcaattacttccgcttcgccaaagcagcggaaaatattcagcacatcagcggtatcttctggggttaccagcgcgtttggcgttacggaggtcatcccggcattaaccagcgcgggagtgttcggcatggcgcggataattttccggtcatggcccagcgcgcgggcaagctggtcgagcgtgacacctgcagcaatagaaacgaccagagagtctttattgaggctggaggtgatttcgctaagcactttaatcatgatgccaggtttaacggcggcaaaaatgatgtcggcgatttgcgccacttcttgcgccgattctgcggcgttgatgccgaacttgtcatgcagggcggcgactttatccggggagggngtatatacccagatttgccctggaagcacctgaccgctggcaatcagaccgccgagaatggcttttcccatattgccgcagccaataaaaccgattttcttttccattgcctcactcctgccgtgaaattcattgttttgataatcgctggcagaagcataaacagaactatgccggaaggcaaaagcgcgacacaatagaggattacccaacaaaggatgactttatgacaatttgggtggatgccgacgcgtgtcccaatgtaattaaagagattttgtatcgcgcggcggaacgtatgcagatgccgctggtactggtagcaaaccagagtttacgcgtgccgccatcgcgatttattcgtacgctgcgcgtcgcggcaggtttcgacgttgccgataacgaaattgtccggcagtgtgaagcgggagatttggtgatcaccgcagatatacctttggctgctgaagccatcgagaaaggcgctgcggcgcttaatccgcgcggtgaacgttacacgccagcgaccattcgtgagcgcctgacgatgcgcgattttatggataccttacgtgccagtgggatccagaccggcggaccagatagcctttcacaacgtgaccgccaggcctttgccgcggagctggagaagtggtggctggaagtgcaacgtagtcgtggctaaatgtaatttnttatttacacttcattcttgaatatttattggtatagtaagggatgtattgagattttcactttaagtggaattttttctttacaatcgaaattgtactagtttgatggtatgatcgctattctcatgacaccggctttcgccgcattgcgacctattggggaaaacccacgatgacacaacctctttttctgatcgggcctcggggctgtggtaaaacaacggtcggaatggcccttgccgattcgcttaaccgtcggtttgtcgataccgatcagtggttgcaatcacagctcaatatgacggtcgcggagatcgtcgaaagggaagagtgggcgggatttcgcgccagagaaacggcggcgctggaagcggtaactgcgccatccaccgttatcgctacaggcggcggcattattctgacggaatttaatcgtcacttcatgcaaaataacgggatcgtggtttatttgtgtgcgccagtatcagtcctggttaaccgactgcaagctgcaccggaagaagatttacggccaaccttaacgggaaaaccgctgagcgaagaagttcaggaagtgctggaagaacgcgatgcgctatatcgcgaagttgcgcatattatcatcgacgcaacaaacgaacccagccaggtgatttctgaaattcgcagcgccctggcgcagacgatcaattgttgattttcgagcgcctatacttaacgttcatcccgtgaaataaggaagaacgatgccaacgaaaccgccttatcctcgtgaagcatatatagtgacaattgaaaaaggaaagccaggacagacggtaacctggtaccaactcagagccgatcatcctaaaccagactcgttgatcagtgaacatccgaccgctcaggaagcgatggatgcgaaaaaacgctatgaggaccctgacaaagagtgaccgcatcagactgctcggaagggattctgagtgccactacaagggatctgcgtcacatttttcataattcatgtttttcaaataattagaatattaaacaataacaatccattactggaatcatttggaatctttacattatgccgtgcacgtctgctgctacgctttttgtcatttgtagcacaagtaagtgtcagcagtggtgcttaacacttgcccggtaattaacgacgaaataaaagtaaggtggaagaacaatgagtgcgtcgttggcgattctaaccatcggcattgtacctatgcaggaagttttgccgctcctgacagaatacattgacgaagataatatttcccatcatagcctgctggggaagttaagccgcgaagaagtgatggcggagtacgcgccagaagcaggcgaagacacaattctcacattattaaatgacaaccatctggcccatgtttcgcgtcgcaaagtagagcgtgacctgcaaggtgtggttgaagtgctcgataatcagggctacgacgtcattatattaatgagtacggcaaacattagtagtatgactgcgcgtaatacgatctttcttgagccgtcgcggatattgccaccgctggtttcctctattgttgaagatcatcaggtgggggttatcgtaccggttgaggagttgctgaccgttcaggcgcaaaaatggcaaattttgcagaaaccgcctgtattttcattgggtaaccccattcatgattcagaacaaaaaatcattgatgccgggaaagaattactggcgaaaggcgcagatgtcatcatgctggattgtttgggatttaatcagcgtcatcgcgatttactgcaaaaacagctcgatgttcctgtcttgctctctaacgtattgattgcacggctggctgcggaattactggtgtaattttgcgtgacagccagcgcatctggcccctatagtgaagtagatgttcaactaccagacagggccagtttatgcttcaaagtaatgagtacttttccggcaaagtgaaatcgatcggcttttccagcagcagcactggtcgcgccagcgtgggtgttatggttgaaggcgaatacaccttcagcaccgctgagccggaagagatgacggtaatcagtggcgcgctgaatgtgttactgcctgacgcgaccgactggcaagtgtatgaagccggttcggtgtttaatgttcccggtcacagtgagtttcatctgcaagttgccgaacccacctcttatctgtgccgctatctgtaattcctcgccttccgcttgaacgggagggcatttttctgaaatgtcctctcataaccccataataatatttcctttgctgcgattttttcaatttccgatatattcataattcatcaaggttgatataaatatcattgaagattatgaatagaattaatatattggtcatctgtatggtcttattttttatgactggcaatgcatgtgccacagagtggatcagtagcgaggaccttatcacctctgactttcatcttatgacggcagatgagcgcaacgtggttaaagcggcaaccgacgatagtatggaagctgcttatatgctaaaagataatatccgctggtattatcataatggtgacctatcattacccgctaacttcagcaataaaaataaactggtggtgaacggtaatttaacgatttccggcgattatgatgattatctgtcaggtaatggtcatctgattgtattaggtaatgttattgtcgataactttattaatcatgatttcgcgtatgtcaaaggacagatgacagcgaaaggtttagtttatgctgattacaatgatcataactttgaagtgatgaagggaattagtgcgcgaggcattattgtttccgataaagcaacgcaatttgaagtcattaaagctgaattttatatcaatgaagatggaagtggtgaaggatataactgggatgagaatattcaaaaagcctattcactggtgactgccgatctttatgatcacactgaaatcgaaaccgataacatttccaatgcgtatcctgactatgatagcgtcgcagacaacatcgttcagggtttaccgctttttcgagataaagccgctcctgaaattaatgagaaattaaaatggattgaaacggggaaactcgataatttcccagcgaataaaataaagcatcaagatccactggtggcacgttttctgactcatacagagagtttatcacccgccgttatgctgcaactgttacagcaccccgatgaccagacgcgtgaatcgatggcgcagtcctggcccgctcaacagatgcattggcttaccgatgaattaattaaagatgaggctgttgccagagggctggttaaaaacagtaatatttccgccgatgtgaataaaaaattaatgtctgtacccgtcgagagcgtacagctggagcaggccagacaggataatctttctccagatattgttgcgtcgttaagtcatagcccctttctcagtgtacgcaagacattactcagccattacgattacgcctggctggttccgactgcagtggccgatgagttgataaataacgaagacccggagttacgtgaaagaattaccggagcagatttaaccgcacaacaagcagtgatgttgagtaaagataaatcactgaaagttcgtgaagcattagcccggacgcttactgaattaaaaattacccaactgtcagcaaccctgcgtacagaggatattgaacgtatcgcagaacaaatgtatctggataataaagaaaataaaaatatcgtaaaggtgttattgatagcgttgccggagatgcgtcaactgtctctggcaaaagaagatgtgcacaatttgcgcgaaggtgcgcgttatctgacatcgaaggacgtgattagttatctattgactcagcatgatgttcccaccgtctgggatgagctggcacgcgataaattattgccgctggaatataagaaacagttatggcaacgcacattaaatttaatgatgagcaaacggcaagaagatcaagagcaagcctacgaagtacagctggcgctgattgataatggtgttgttgacgaagagatgttaaataatgccattgatttactggttgatttacccgctgaataccgctatcgaatgcgtaaccaattatttgataataaagaattaccttccggaattatcaacaaactcgatcaacagtatcgcttcaactctgactgggcgctggctgttgtcagtatgaaaaatagcacccgtagacaaagtgaaagaggattacaccgctggaaccatgaggatagcgatatttttgcggaactggcgacgataaaagataaatcagatgatgaatggtggcgtgcattgctgcaaagtcgcaatgatcatttgcgccaaacggcattacgcaacgcacataccccggcgtcgttgttaacgacattgactgagtctcaggatcggtcgctggctattaataatccacagctggctgccgatgtgaaaacggtgtggctaaaagaggatccatcattacttttatttgtcgataaacccgatctttcgcagttacgggatttagtgaaaaccggggcaacgcggaaaattcgcaatgaagcgcgtcaccggcttgaggaaaaacaatgacacaacgcccctggagcaagttacagcgggagatctatgacttactgacgccaacgatcaacctgcaaattcactgtacccgttatcccatgcgcagccaaaatggtggaagcaccgatttaccgcgttattggatcacgttggataaaaacgtgatctgggattacccgaaagactttattgcaggcaacggtggagtgcgtaattttcacggtgaaacttgctggtatccttacctgacggatatttgttcaatttctgatttattgcgtgaatatattgacaccccaaaagcggagttgttaacaaaacaatttaccagcgataaatgggggttagtgaatattctgcgtgctgctgacaggcgaatagggatgaggcgattagatcagttacggcgtaaaacgcataatattgcnnnnnnnnaaaatnattgcccgccgtagcgaataattatatgcctggtgtggcttcgtacgccggataagacgcggcaggcgtcgcatccggcattaaaggaaaatcagcaattaacgttgtgcttcgccacctaatccttcaatcaggttttgaattaacgctgccagttcaccagtcatcaggatgaaatcggcatcaaaacgctgggcgaaatcttcacggtcgatatcttcgttttgatcgcgcagctcgtcgcagaacttcagacgcttgagcgaaccatcgtcgcacatcacaaactgaatgcgctgctgccagtcgagcgccagtttagtcaccacttttccggcttcaatgtgattggtgatctcttcgctggtcagatcttgtttcttcgcgcggatcactccgccatcttccagcaacgatttcagctcggcttcatcaagcagctggaagccctgtgccgcactaccggaacgtacccattcggtcagcgtcagttcaatcgggtttgccatgctcaatggtacaaccggtaacgaccccaggcttttacgcagcagtgccagcgtatcttccgcttttttggcactggcgcagtccaccataatcaaaccgttaaccgtgtcgatccacatcattgtctggctaaaacggctgaaagcacgcggcaacagagagtgcagcacttcgtctttcagcgaatctttttcggttttcttcagcttacgcgcctgttccgcttccagtttggcgattttcgcttccagcgcctgtttaatcaccggagacggtaggattttttcttctttgcnnnngcagataacaatttgaccattggcaacgtgcgttaacgcatcgctgtgcgatcccatcggaggaacccagcccatcttcgccatgtcctggctgccgcatggggtaaatgccatcgaggctagctgtttttccatctcttctgcacgcagcgaaatctcgcggctaagacggtaaaccattaaatttttgaaccacagcatgataatttccacggccttgtcgttaaatttagcgggcatgataacgaattgtcggcggccttgcattgccaatccggttgtccgtctctacgctattgatattgaaaaaaataaggagagtaccgtgcgtataggtatcgatttaggcggcaccaaaactgaagtgattgcactgggcgatgcaggggagcagttgtaccgccatcgtctgcccacgccgcgtgatgattaccggcagactattgaaacgatcgccacgttggttgatatggcggagcaggcgacggggcagcgcggaacggtaggtatgggcattcctggctcaatttcgccttacaccggtgtggtgaagaatgccaattcaacctggctcaacggtcagccattcgataaagacttaagcgcgaggttgcagcgggaagtgcggctggcaaatgacgccaactgtctggcggtttcagaagcagtagatggcgcggcagcgggagcgcagacggtatttgccgtgattatcggcacgggatgcggcgcgggcgtggcattcaatgggcgggcgcatatcggcggcaatggcacggcaggtgagtggggacacaatccgctaccgtggatggacgaagacgaactgcgttatcgcgaggaagtcccttgttattgcggtaaacaaggttgtattgaaacctttatttcgggcacgggattcgcgacggattatcgtcgtttgagcggacatgcgctgaaaggcagtgaaattatccgcctggttgaagaaagcgatccggtagcggaactggcattgcgtcgctacgagctgcggctggcaaaatcgctggcacatgtcgtgaatattctcgatccggatgtgattgtcctggggggcgggatgagcaatgtagaccgtttatatcaaacggttccgcagttgattaaacaatttgtcttcggcggcgaatgtgaaacgccggtgcgtaaggcgaagcacggtgattccagcggcgtacgcggcgctgcgtggttatggccacaagagtaaaaaacccaggcaattggcgcatcatgcctgatgcgacgcttgccgcgtcttatcaggcctacaaaatgtgccagaaccgcgtagggcggataaggcgttcacgccgcatccggcaataagcaacgcacaccgtgacagtaatctaccccagtggtttcgccagcaccggactatccgccgcttgctggcgcttatagcgaccatacagcagcaacgatgacatcgcagcaaacgaaagcagggcggcaggcagcgccacgtaattatatgccagccccagcgtcagcatcatacctccgcaatatgcgccgacggcgctaccgaggttaaacgctatttgcccacctgcggcacctaataactctccgcctttggcattttgcagtaacaatatttgcagaggtgctgaaagggcaaataatcccgcgcaacaaataaaagcaaaaataagcgacgttgttttcatgccgccgcagaaaaagagcatcagcagtgccagtacaattataaagtcagtcactgctgcaatgcgcagtggtgaataacgtcctgaaatcctgccacttagcatatttcccagcaccatccctagcccaactaacatcataataaaggtcatcgccgtttccgaaaaaccggaaataaacatcatgtatggctttacgtagctgaaccaggcaaacacacctgcgttgccaaacatggtggcggcgaaaattaaccacggggccgggctgcgcaaaaagtgaaattgttcgcgcagctttcctttcgcctcgtcgcgaatatccggcacccaaaaatagaccgatgccatcaccgcaatattaaaaacagcgatcaataaaaaggtgtaacgccagctaaattcctgacttaaatacgttcccagcggaatgcccagcaaattggcgactgtcatcccggaaaccatccccgccacggcggcggtgacttttccgggtttgataatttttgataacacgatcgctccgacgccaaaaaatgcgccatgcggaaagccggaaaccaggcgaccaatggcaagcatcaggtacgacgaagagagcgtgaacatggcgttgccaatgacgcacaacgccaccagaaacaacaagatatgtttgagtgagtagcggctggaaaagagtgcgattattggcgcaccgaccaccacccccagcgcataatacgagatcatatgcccggcagcaggaatcgaaattcctacgttatgcgccagctccgtgagcacgcccataatgccaaattcggccatccccaaaccaaacgtgcccagagccaaagataaaatgacttttttcataccaccatcacaactaccagaacggctaccaatcaccgtagccaataaagtgatagcttgcaggataacgaccagcaaggccaagagataattcgcccctctgtattcattatcctgctgaatagttatttcactgcaaacgcactttccagtttgctgtagcccaggccgttgatcttcttcactttgatctgcacaggaatacgctctttcatcgcttcaacgtggctaatcacaccgatggttttgccactggcgttcagggcatccagcgcatcaagggcggtatccagcgtttcgctatccagcgtgccaaaaccttcatcaaggaacagcgagtcaatacgtgttttatggctgaccagatccgaaagcgccagcgccagcgccagactaacgaggaaactttcgccgccggaaagggtacgggtatcgcgtaccgcatctgcctgccaggtatcaacaacctcgacttccagcgcctcgctggctttgcgctgtaacagatagcgcccgtgcagccgggtaagttgctgattagcgagatggactaaattatccagcgtcagcccctgggcaaacttgcggaatttatcgccctctttggaacctattagcgaattcagatatccccagtcctcaacctgctgcgtcatttgagcaatttgctgcagtaaggtttgttgttgctgacggttatctgcatcctgcttcagctgctggcgaatctcgccttgactcgtggtgttttcacgcaacttttggtgagtttncgctaactcttgctgaatctgctccaccgtcacagtgagagccaacccgtcaggtcggtgttgttgatgctgtgccagcgtttctgctgtctgagtgaccagcgtttgcgcctgacggcgctggttttccagattctgcttgagctgttccagctgcgttagtgtttgttcatccattagcgccgcaaggaacgcctgctgatcgtcaaagacgctggcctgtagcgcggtgtcaaactgcgcctgggctttttgcagactttgcgccgccagaacatcctgttgctgtaacgtctgctgctggctgtgtaatgcgagacattgttcatgaacctgccgccagttatccagcgccacagtttcttcgctgtgcgggagatcatcactttgcggcaacgtttccagaatcggcgtcagctgctgaatacggttttgcagcgcggttaattcgttctggcgttgctgccagctctgcgcttcttgctgacgtgtcgccaaccagctctcttcttcatcttcctgtggcaatgtcagtgcataacccgccaatgccgttaagagctgctgctggcgttgttcaatttgctgttgatactggataatttgctgattatgcgcggcaatctgcccttgtaattcatgtcgttggctgagtaaccgcagctggcgttcgtgctcatcttgtgcatccagccacggttgaatatcgtcctgtggctgcaaggtgatattgaggctggccgtgacggcttgccattgttgagtaagtgcttgctcatcttgtcggaggctttgcgcttcgttttcatcgcgctgaagctgcttcgttaatgcatccagttgcccgcgcagcgccgcaccttcttcgccgagctttttaacttcgttttccagcgccagtaatcgagactgattaacgccaggctccagcgcctgatacgcctcgaccgccggatggctggtggaaccacaaagtggacaaggctgacccgcctgtaactgtgcacgttgagcttccagcgttttgatgcgcgcttcctgctcgcaaatggttttcacatcggcaagttgctgcgtcttttctttataacgctggcgcatttcgttaagtgcggcattacgttgcgtctgttccagagtgacattctggatagtgaccattaactgcgccagacgtttttgttggggaacaatctgcccatgcagcgcgaccaggcgctgacgcagtgggcgttgctcagcatgttgcgccagggcggtagcaacttcatcggcggttaacgtcaacgtgatcgccgcaagcgcattaagtttttgctcagcatgggttaactgttgctgccattgccgcagatgctcgcgatcgctggtttgttgggagaactgcgcacgccaacccgccagttcgttgttccactgacggaagcggtcgtgttcctgtaaccaggtattcaggctttgttgctgctgctgtaattctgctgactgcttcgccgcgtggtggcgaatgctcgcgcgaagcgccattgtgttctgtaagcgagtatttacttcttcaatctgctggcgagtatgcnnnagcgccgcgctgtgttctgcgatgcgttcccagtgcggacgaagatttcgtgccggttgtgccagactgagcgccgccagttgaggttgcgctttttcttcttcggctaacgcctgttgcaaggcctgctgacggcggctggcttcttgctgcaattcgtccagacgcgttaaccagtttagtgattgttgttcttgctgctgcgcggtaagtaactgtttttcttcgtcagtaagtacctgcaaactcgctgtcagcgattgcacttgttccggcgtgagcaacgcgacgcagctggcctgcgcttgcagcttctccagctctgtgcgggccgatttgtgctgctcaaaaaccatcgccgagatttgcccgtagatttcagtgccggttaactcctcgagcaattccgcgcgttctttgggtttggcattcaggaaggcagcaaattgcccctgcgaaagcagcatcgaacgggtgaagcgcccgtaatccagcccggttaacgtcgctgtcagttccagcttatctttcactttgtcggcgagaattttgccgtcggcgcagcgcgccagctctacgcgtggcacctgcaaattaccgtcgggttggttacgcgcccgattctggctccagaacgcgcgatacgcttcacctttcacttcaaactccacctccgccagacattcagcggtatcgcgggtcatgagatcattttgcgattgtgaaacgttagagagacgcggagtttcgtgatacagcgccagacaaatggcgtccagcagggtggttttccccgcaccggtcgggccggtaatggcaaacagcccgttgctggcgaacggctcgcgggtgaaatcaatcttccattcgccttttaatgagttcaggtttttcaggcgcaggctgagaattttcatgcttcgtgttctccggcgagggtatgcaacgtcgtggtgaaaagatgctgcagacgttgctgctgcgattcatccagttcttccagtgccagacggcgattgaacacctcttcgacgctgagttcgctgagggtttcacgctgttggctggctaacacacgctcgcgctgttcacgactccgacgtaccagcaatatttcaacaggcaatgattcggttaatgcctggattttgcgctgaatatcatgcagatactcatcagtagtgatttcgatatccagccagacaggtggctcctgcgatacatcgcgccactgttccagctgtgcggtaatcgacgccagatcgcctttcagcactgccatgggttgcgttaccggtacgttcaggttttccacgctctctaatttgccgtttgaaaatgtcaccagatggacatatttactcttaccgcattcatcaaaactcagtggaatgggggagccgcaatagcgaacatgttccatgccgccaataatctgtgcgcggtgaatatgcccgagcgcgatgtagtcggctggtggaaagttttgtgccggaaacgcgtccagcgtgccaatataaatgtcacgcacggcgtcacttttactggcccccacggtcgttaaatgtcccgtggcgatgatgggcagaggctgatcgccgcgcagtttgcaggcatcggcatagtgttgttggtaataatcggtaatcgctgccagtaaatgctgctgtttttcaataccgttaagccccgcctggctggtaataatgtcacgcggacgtaaaaacggaatggggcacagcactgcgcctggcgtcccgtcgcgacgaggcaagatttgcggcgcatgtccggcgctggcgaccacggtagtattgaggaacgccatgatatcgcgcgattcattcagcgtggcgaccgagtcatggtttcctgccagtaccaccagatgacagccagtttgctgtaaattgacaacaaaacggttgtataacgtgcgggcgtaactgggcggcgagccggtatcgaaaacatcaccggcaacaataatcgcatccacctgatgggtttgtgctgtctccagcagccagtcaagaaaagcctgatgttcagcttcgcggcttttactgtagaagttctggccgagatgccagtctgaggtgtgaaggatgcgcataacggttccctggcgaaaaagcatgggcgcgattatacccaaacagatgtgccatttgcttttttctgcgccacggaaatcaataacctgaagatatgtgcgacgagcttttcataaatctgtcataaatctgacgcataatgacgtcgcattaatgatcgcaacctatttattacaacagggcaaatcatggcgagacgtattctggtcgtagaagatgaagctccaattcgcgaaatggtctgcttcgtgctcgaacaaaatggctttcagccggtcgaagcggaagattatgacagtgctgtgaatcaactgaatgaaccctggccggatttaattctccttgactggatgttacctggcggctccggtatccagttcatcaaacacctcaagcgcgagtcgatgacccgggatattccagtggtgatgttgaccgccagaggggaagaagaagatcgcgtgcgcggccttgaaaccggcgcggatgactatatcaccaagccgttttcgccgaaggagctggtggcgcgaatcaaagcggtaatgcgccgtatttcgccaatggcggtggaagaggtgattgagatgcagggattaagtctcgacccgacatctcaccgagtgatggcgggcgaagagccgctggagatggggccgacagaatttaaactgctgcacttttttatgacgcatcctgagcgcgtgtacagccgcgagcagctgttaaaccacgtctggggaactaacgtgtatgtggaagaccgcacggtcgatgtccacattcgtcgcctgcgtaaagcactggagcccggcgggcatgaccgcatggtgcagaccgtgcgcggtacaggatatcgtttttcaacccgcttttaacgccttgctcatcggacgcagagcagggcttatgatttcttaactggagtatcttacgtgctggaacggctgtcgtggaaaaggctggtgctggagctgctactttgctgcctcccggctttcatcctgggtgcattttttggttacctgccctggtttttgctggcatcggtaacaggactgcttatctggcatttctggaatttattgcgcctttcatggtggctgtgggtggatcgcagtatgaccccgccaccggggcgtggtagctgggaaccgctactatacggcttacaccagatgcagctgcgaaataaaaaacgccgccgtgaactgggcaatctgattaaacgctttcgtagcggcgcggagtcgctgcccgacgcggtggtgctgaccacggaagagggcggtattttctggtgtaacggtctggcgcaacagattcttggtttgcgctggccggaagataacgggcagaacatccttaacctgctgcgttacccggagtttacgcaatatttgaaaacgcgtgatttttctcgcccgctcaatctggtgctcaacaccgggcggcatctggaaattcgcgtcatgccttatacccacaaacagttgctgatggtggcgcgtgatgtcacgcaaatgcatcaactggaaggggcgcggcgtaacttttttgccaacgtgagccatgagttacgtacgccattgaccgtgttacagggttacctggagatgatggatgaacagccgctggaaggcgcggtacgcgaaaaagcgttgcacaccatgcgcgagcagacccagcggatggaagggctggtgaagcagttgctaacgctgtcgaaaattgaagccgcaccgacgcaattgctcaatgaaaaggttgatgtgccgatgatgctgcgcgttgttgagcgcgaggctcagactctgagtcagaaaaaacagacatttaccttcgagatagataacggcctcaaggtgtctggcaacgaagatcagctacgcagtgcgatttcgaacctggtctataacgccgtgaatcatacgccggaaggcacgcatatcaccgtacgctggcagcgagtgccgcacggtgccgaatttagcgttgaagataacggaccgggcattgcaccggagcatattccgcgcctgaccgagcgtttttatcgcgttgataaagcgcgttcccggcaaaccggcggtagcggattagggttagcgatcgtgaaacatgcggtgaatcatcacgaaagtcgcctgaatattgagagtacagtaggaaaaggaacacgtttcagttttgttatcccggaacgtttaattgtcaaaaacagcgattaatccgcctttgtcatcttttattgccataagccagccgatgctggcttattttctttgcagtcaaaatacgggcgttagattttacaacggttggtgattttttgttcgcatgattagccatgtctttttcacggaaatagtgttttatactggttggtgatttcttatcgctatatacctctggtttttagatccctccttgctttaaaacgttataagcgtttaaattgcgcttcaggtgctgtcatactgactgcattaacgcggtaaatcgaaaaactattcttcgccgcgcctggttgggagtatttcccgctaaaattgtttaaatataccgctgtatcatccccagggattggcacaaaaatttaacgttacaacaccacatccacaggcagtatgatttatgacccatcaattaagatcgcgcgatatcatcgctctgggctttatgacatttgcgttgttcgtcggcgcaggtaacattattttccctccaatggtcggcttacaggcaggcgaacacgtctggactgcggcattcggcttcctcattactgccgttggcctgccggtattaacggtagtggcgctggcaaaagttggcggcggtgttgacagcctcagcacgccaatcggtaaagtcgctggcgtactgctggcaacggtttgttacctggcggtggggccgcttttcgctacgccgcgtacagctaccgtttcttttgaagtggggattgcgccgctgacgggtgattccgcgctgccgctgtttatctacagcctggtctatttcgctatcgttattctggtttcgctctatccgggcaagctgctggataccgtgggcaacttccttgcgccgctgaaanttatcgcgctggtcatcctgtctgttgccgcgattgtctggccggcgggttctatcagcacggcgactgaggcttatcaaaacgctgcgttttctaacggcttcgtcaacggctatctgaccatggatacgctgggcgcaatggtgtttggtatcgttattgttaacgcggcgcgttctcgtggcgttaccgaagcgcgcctactgacccgttataccgtctgggctggcctgatggcgggtgttggtctgactctgctgtacctggcgctgttccgtctgggttcagacagcgcgtcgctggtcgatcagtctgcaaacggcgctgctattctgcatgcttacgttcagcacacctttggcggcggcggtagcttcctgctggcggcgttaatcttcatcgcctgcctggtaacggcagttggcctgacctgtgcttgtgcagaattctttgcccagtacgtaccgctctcttatcgtacgctggtgtttatcctcggcggcttctcgatggtggtttctaacctcggcttaagccagctgatccagatctccgtaccggtgctgaccgctatttatccgccgtgtatcgcactggttgtattaagttttacacgctcatggtggcataattcgtcccgcgtgattgctccgccgatgtttatcagcctgctttttggtattctcgacgggatcaaagcatctgcattcagcgatatcttaccgtcctgggcgcagcgtttaccgctggccgaacaaggtctggcgtggttaatgccaacagtggtgatggtggttctggccattatctgggatcgcgcggcaggtcgtcaggtgacctccagcgctcactaaatcactgaacatttgttttaaccacggggctgcgatgccccgtggttttttattgtgttgatgggttaggaattgatggaaagtaagaacaagctaaagcgtgggctaagtacccgccacatacgctttatggcactgggttcagcaattggcaccgggctgttttacggttcggcagacgccatcaaaatggccggtccgagcgtgttgttggcctatattatcggtggtatcgcggcgtatatcattatgcgtgcgctgggggaaatgtcggtacataacccggccgccagctctttctcgcgttatgcgcaggaaaacctcggcccgctggcaggttacattaccggctggacctactgctttgaaatccttattgtcgccatcgccgatgtgaccgcttttggtatctatatgggtgtctggttcccgacggtgccgcactggatttgggtactgagcgtggtgctgatcatttgcgccgtaaacctgatgagcgtgaaggtattcggtgagctggaattctggttctcgttctttaaagtcgccaccatcatcatcatgattgtcgccggtttcggcatcatcatctgggggattggcaacggcgggcaaccgaccggtattcataacctgtggagcaacggcggcttcttcagtaacggctggcttggcatggtaatgtcgttgcaaatggtgatgtttgcttacggtgggatcgaaattatcgggattaccgccggtgaagcgaaagatcctgagaaatcgataccgcgtgcgattaactccgtgccgatgcgtattctggtgttctacgtcggtacgctgttcgtcattatgtctatctacccgtggaatcaggttggcactgccggtagcccgttcgtgctgacgttccagcatatgggcattacctttgccgccagcattcttaactttgttgtgctgactgcttcgctgtcggcaattaacagtgatgtatttggcgtaggccgtatgctccacggtatggcagagcagggcagcgcgccgaaaattttcagcaaaacgtcgcgtcgcggtattccgtgggttacggtgctggtgatgactaccgcgctgctgtttgcggtgtatctgaactacatcatgccggaaaacgtcttcctggtgatcgcttcgctggcaaccttcgccacggtgtgggtgtggattatgatcctgctgtcgcaaattgccttccgtcgccgtttgccgccagaagaagttaaggcgctgaaatttaaagtgccgggtggggtagcaacgaccatcggcgggctgattttcctgctctttattatcgggttgattggttatcacccggatacgcntatctcgctgtatgtcggtttcgcgtggattgttgtgctgttgattggctggatgtttaagcgtcgccacgatcgtcagctggctgaaaaccaataatacttgcgttctgtaagccggttcaggaggaaatcctgatccggctattccgaaagttatccgcccccgtcctcctcccccaaatatccttcagatgatgagtgatcctgcattaggctatggcaaggtgatcagattttcatcacaggggaattatgatgttaaatgcatggcacctgccggtgcccccatttgttaaacaaagcaaagatcaactgctcattacactgtggctgacgggcgaagacccaccgcagcgcattatgctgcgtacagaacacgataacgaagaaatgtcagtaccaatgcataagcagcgcagtcagccgcagccaggcgtcaccgcatggcgtgcggcgattgatctctccagcggacaaccccggcggcgttacagtttcaaactgctgtggcacgatcgccagcgttggtttacaccgcagggcttcagccgaatgccgccggcacgactggagcagtttgccgtcgatgtaccggatatcggcccacaatgggctgcggatcagattttttatcagatcttccctgatcgttttgcgcgtagtcttcctcgtgaagctgaacaggatcatgtctattaccatcatgcagccggacaagagatcatcttgcgtgactgggatgaaccggtcacggcgcaggcgggcggatcaacgttctatggcggcgatctggacgggataagcgaaaaactgccgtatctgaaaaagcttggcgtgacggcgctgtatctcaatccggtgtttaaagctcccagcgtacataaatacgataccgaggattatcgccatgtcgatccgcagtttggcggtgatggggcgttgctgcgcttacgccacaatacgcagcagctgggaatgcggctggtgctggatggcgtgtttaaccacagtggcgattcccatgcctggtttgacaggcacaatcgtggcacggggggagcttgtcacaaccccgaatcgccctggcgcgactggtactcgtttagtgatgatggcacggcgctcgactggcttggctatgccagcttgccgaagctggattatcagtcggaaagtctggtgaatgaaatttatcgcggggaagacagtattgtccgccactggctgaaagagccgtggaatatgnacggctgncggctggatgtggtgcatatgctgggggaagcgggtggggcgcgcaataatttgcagcacgttgctgggatcaccgaagcggcgaaagaaacccagccggaagcgtatatagttggagagcattttggcgatgcacggcaatggttacaggccgatgtggaagatgccgccatgaactatcgcggcttcacattcccgttgtggggatttcttgccaataccgacatctcttacgatccgcagcaaattgacgctcaaacctgtatggcctggatggataattaccgcgcagggctttctcatcaacagcaattacgtatgtttaatcagctcgacagccacgatactgcgcgatttaaaacgctgctcggtcgggaggttgcgcgcctgcccctggcagtggtctggctgttcacctggcctggtgtaccgtgcatttattacggtgatgaagtgggactggatggcaaaaatgatccgttttgccgtaagccgttcccctggcaggtggaaaaacaggatatggcgttattcgcgttgtaccagcgaatgattgcgctgcgtaagaaaagtcaggcgctgcgtcgtggcggctgtcaggtgctgtatgcggaagataacgtggtggtatttgtccgcgtgctgaatcagcagcgtgtactggtggcaattaaccgtggcgaagcctgtgaagtggtgctacccgcgtcaccgtttcttaatgtcgtgcaatggcaacgcaaagaaggccatgggcaactgacagacgggattctggctttgcctgccatttcggctacggtgtggatgaactaaagcatctgttttatttgttacgtcgttagtcaccagccctgacactacgcagcgcaaaaaagctgctcaatgtcagggctgaatttgttaaatatttgtcccgatcgatatgagcgatttttggtattgtttgcccatgatgttatgtacaacatgctccaggataaccctgtagtggagcaaagatatgacaatttcaaattcgaattnattgaaaccgtttattactggtactgagttgccaccttttanagaggatgtcttttctaaaacagaagaacaatttaaaaaaagcacctatggcaaatcgcttttcatttccggaaatgaaaacttagtaaacatttcagcggaaaaaatcgatgaaataaaaaatagcaaaaatttcttttcaaacattgtaaatataataattttactcattaagcatcctgataaaattctgcccattcttcatggttgtcctgtagagtcgatcgaagtcattaagaatgcgaaacgaacgggacaatggtcatatgagatgactgataagaacgggcagagtattgaagtgtcctatattttcactgataccatagatgataaatctgatggaaaattatgcttaaaaatctgtaactcctgcaaccaaaatgattctagtacacatgaatataaaatagatcatcaacagttgaaaaatcacataaggcaacttgaggagtgggcccttcttgaaaagttttatgataacaacgcttattattctaaacgtacaaaacaattagagaagaaaattgccgatgcggggtttataacaaggaaggttaaagccgagaactttaatgtaaaagagtttaaagacgatatagcctcgatgctttgtgaacagccccccatgcgtacacaccagatttcttcatccggatacgtatctgccgataaactgcacaaactctataagacaaatttggaagacgcgcagagagatctgaaaacaacaccggttgacatcgatggtgttagtctaaaatcaataactcgggaaaaaattgcggaagaaattgcgaaaaaaactgcggaaataattgcgaaacaaaatgcgaagagcattgaggagaagaatattgaaaaaaacaagaaacaaacaaattctgaggataattttgtcttaaaattctcaccggaagaaatcaatgagatgctcctggattacagcgatgaagaacaaaaaaaattaagaccttttttcactagtgatcacatctattgtttgtttgatgcttttagtcagggtttgcataatgttgctcgtaatggcagtccacggtatgcaggtttactacgtcaaatagcatccaagtctgcgatattacaagattttgatcaacaattgttctggcgcacgtttacaggaggggtcctccatcgacatatctctgtgaagagcgagccagaaaagacagatgtatggcgattcagtagccaatttgattttccacatataaatgaaaacggagagttgtccagaacggtactcatgttcgagggggttgctgaaagcaactttaaagatatcgccaatcattccagcgaatgtttttcttaccgttgttatgccgccccgctggatgcgaatgctaaaaaatagtgacgccggagtttgaagtttcagagcgccttgcgtgacgcctgcgccatcatccgtggataaaactgccagaagcgggtttcgagggcggcataatgggcgtctaaatcgtaccaggagtcacgcagggcatccagacgtgggcgacggcttgccatgccgtttaacacgttctggatgaaatccatatcgcgatagcgcaccagccactgctctgaccataagtagttgttcaggttgataaagcgtggcggtgagtccggcaaaattgtcatcacttgctcgcgggcataacaaacaaattcctgtagcggaaagtccggcgacagctgcgaccagtgacgggaaagaaagtgatcccacatgacatccagcgtaataggcgcaacgcggcgagtttcactacgaaaccactcccgtgcttcgcggacttccggcagattgtcagtcaatacgtcgatacgtcgatgcatatgaatgccagccacgacgtcgggcggaaaactttcttcaggatttccgcgtacgaaatcagccagcaaattgnnnnnnngnganntntccgcgagatgggctaaatgcaggtgagctaaaaaattcatcgattatattctatccaaaggggggtaaaggttgcagggagagcgccccggcactagactacccgcctcttattttagtctgagtcagtgtcatgcgcgttaccgatttctcctttgaattgcccgaatccctgattgcccactatccgatgcctgaacgcagtagctgtcgtttactgtcgctggacgggccgacgggcgcgctgacgcacggtactttcaccgatttactcgataagctcaaccccggcgatcttctggtttttaataatacccgggtgatcccgnnnnnnnnnnttgggcgtaaagccagcggcggcaagattgaagtgctggttgaacggatgctcgacgacaaacgcattcttgcgcatattcgcgcctcgaaagcgccaaaacctggcgcagaactgctgctgggcgatgacgaaagtattaacgcaacaatgaccgcgcgccacggcgcactgtttgaagtcgaatttaatgatgaacgctcggtgctggatattctcaacagcatcggccatatgccgctgccgccgtatatcgaccgtccggacgaagacgctgaccgcgaactttatcaaaccgtttatagcgaaaaaccgggcgcggttgcagccccgaccgctggtctgcattttgacgaacctttgctggaaaaattacgcgccaaaggcgtggagatggcgttcgtcaccctgcacgttggtgcgggcaccttccagccggtacgcgtcgacaccattgaagatcacatcatgcactcggaatacgctgaagtaccgcaggatgtggtagacgcggtactggcggcgaaagcgcgcggtaaccgggtgattgcggttggcaccacctcagtacgttcgctggaaagcgcggctcaggcggcgaaaaacgatctcatcgaaccgttctttgacgatacccaaatctttatctatccgggcttccagtacaaagtggtcgatgcgctggtgacaaacttccaccttccggaatcgacgctgattatgctggtttcggcctttgccggttatcaacacacaatgaatgcctataaagcggcggtagaagagaaatatcgcttttttagttacggtgatgcgatgtttatcacgtacaatccgcaggcaattaatgagcgcgtcggggagtaattccgcggcgctggtttaaacgttggactgtttttctgacgtagtggagaaaaaatgaaatttgaactggacaccaccgacggtcgcgcacgccgtggccgcctggtctttgatcgtggcgtagtggaaacgccttgttttatgcctgttggcacctacggcaccgtaaaagggatgacgccggaagaagttgaagccactggcgcgcaaattatcctcggcaacaccttccacctgtggctgngcccgggccaggaaatcatgaaactgcacggcgatctgcacgattttatgcagtggaagggaccgatcctcaccgactccggcggcttccaggtcttcagccttggcgatattcgtaaaatcaccgaacagggcgtgcacttccgtaacccgatcaacggcgacccgattttcctcgacccggaaaagtcgatggagattcagtacgatcttggttcggatatcgtcatgatctttgatgagtgtacgccgtatcctgctgactgggattacgcaaaacgctccatggagatgtctctgcgttgggcgaagcgtagccgtgagcgttttgacagtctcggaaacaaaaatgcgctgtttggtatcattcagggcagcgtttacgaagatttacgtgatatttctgttaaaggtctggtagatatcggttttgatggctacgctgtcggcggtctggctgtgggtgagccgaaagcagatatgcaccgcattctggagcatgtatgcccgcaaattccggcagacaaaccgcgttacctgatgggcgttggtaaaccagaagacctggttgaaggcgtacgtcgtggtatcgatatgtttgactgcgtaatgccaacccgcaacgcccgaaatggtcatttgttcgtgaccgatggcgtggtgaaaatccgcaatgcgaagtataagagcgatactggcccactcgatcctgagtgtgattgctacacctgtcgcaattattcacgcgcttacttgcatcatcttgaccgttgcaacgnnnnnnnaggcgcgcgactcaataccattcataaccttcgttactaccagcgtttgatggcgggtttacgcaaggctattgaagagggtaaattagagagcttcgtaactgatttttaccagcgtcaggggcgagaagtaccacctttgaacgttgattaatattaataatgagggaaatttaatgagcttttttatttctgatgcggtagcggcaacgggtgcaccggcgcaaggtagcccgatgtctttgattttgatgctggtggtattcggtctgattttctatttcatgatcctgcgtccacagcagaagcgcaccaaagaacacaaaaagctgatggactccattgccaaaggtgatgaagttctgacgaacggtggcctggttggtcgcgtaaccaaagtagcggaaaacggctacattgctatcgcgctgaatgacaccactgaagtagttattaaacgtgacttcgtagctgccgtcctgccgaaaggcaccatgaaggcgctgtaattaaaatnnnnccctaagggaattgccgtgttaaaccgttatcctttgtggaagtacgtcatgctgatcgtggtgattgtcatcggtctgctgtatgcgcttcccaacctgtttggtgaggatccggctgttcagatcactggtgcgcgcggagtcgccgccagtgagcaaacgctgatccaggtccagaaaacgttacaagaagaaaaaataactgctaagtctgtggcactggaagagggcgctattcttgcgcgcttcgactccactgacacccagctgcgcgctcgtgaagcattaatgggcgttatgggtgacaaatacgtcgtggcgcttaaccttgccccggcaacgccgcgctggctggcagctattcacgctgagccgatgaagctcggccttgacctgcgtggcggcgttcacttcctgatggaagtggatatggacaccgcgcttggcaaactccaggaacaaaatatcgatagcctgcgcagcgacctgcgcgaaaaaggcatcccgtataccaccgttcgtaaagaaaataactacggcctgagcatcactttccgcgatgctaaagctcgtgatgaagccattgcgtatctgagcaagcgtcatccggacctggtgattagcagtcagggcagcaaccagctgcgtgcggtaatgagcgatgctcgtctgagtgaagcgcgtgaatatgcggtgcagcagaacatcaatatcctgcgtaaccgtgtaaaccaacttggcgtggcggagccggtggttcagcgtcagggtgctgaccgtatcgttgttgaactgccaggtattcaggacactgcgcgtgcgaaagagattctgggtgcgacggcaacgctggaattccgtctggtaaacaccaacgttgatcaggccgctgcggcatccggtcgcgtaccgggcgactctgaagtgaaacagacccgcgaaggtcagccggttgtgctgtacaaacgcgtaattcttaccggtgaccatatcaccgactccacttccagccaggacgaatacaaccagccgcaggttaacatctcgctcgatagcgctggtggcaacattatgtctaacttcaccaaggacaacatcggcaaaccgatggcaaccctgtttgtggagtacaaagacagcggtaagaaagatgcaaatggtcgtgcggttctggtgaaacaggaagaggtgattaacatcgccaacatccagtctcgtctgggtaacagcttccgtatcaccggcatcaacaacccgaacgaagcccgtcagctgtcactgctgctgcgtgccggtgcgttgatcgcgccgattcagattgttgaagaacgtacaattggcccgaccctgggtatgcagaacattgagcaggggctggaggcttgccttgccggtctgctggtttctattctgttcatgatcatcttctataagaagtttggtctgattgcgaccagtgctctgattgccaacttgatcttgatcgtcggtattatgtcgctgttgccaggcgcaacactgagtatgccaggtatcgcgggtatcgtcttaacccttgcggtagcggtcgatgcgaacgtactgatcaacgaacgtattaaagaagagttgagcaacggacgtactgttcaacaggcaattgatgaaggttatcgtggcgcattcagttctatcttcgatgcgaacatcaccacgctgattaaagtcatcatcctgtacgcagtgggtaccggggcaattaaagggttcgcgattactaccggtatcggtgtggcgacgtcgatgtttaccgcgattgtcggtacgcgtgccatcgtaaacctgctatatggcggcaagcgcgtcaagaagctgtcaatctgaggagtgcgatgtggcacaggaatatactgttgaacaactaaaccacggccgtaaagtctatgactttatgcgctgggactactgggcttttggcatctctggtctgctgttaatcgctgctatcgttattatgggcgtgcgcggctttaactgggggctggatttcaccggtggtacggttatcgaaattacgctcgaaaaaccggctgaaattgacgtaatgcgtgatgcattgcaaaaagccggttttgaagagccgatgctgcaaaactttggtagcagccacgacatcatggtccgtatgccgcctgctgaaggcgaaaccggcggtcaggtgctgggcagccaggttctgaaggtgattaacgaatccaccaatcagaatgcagcagtgaagcgtattgagttcgtcggtccgagcgtgggggcagaccttgcgcaaaccggtgcgatggcgttgatggcagcgctgctgtctatcctcgtgtacgtaggtttccgctttgagtggcgactggcggcaggggtggttattgcgctggcgcacgacgttatcattacgctgggtattttgtcgttattccatatcgagattgacctgaccattgtggcatcgttgatgtcggttatcggttactcgcttaacgacagtatcgtggtatcggaccgaattcgtgaaaacttccgcaagatccgtcgcggtacgccttacgaaatctttaacgtgtccttgacccagacgctgcaccgtaccttgatcacatccggtactaccttgatggttatcctgatgctgtatctcttcggtggtccggtactggaaggcttctcgctgaccatgcttatcggtgtttccatcggtactgcatcttccatctatgtggcatctgcgttggctctgaaactgggtatgaagcgcgaacacatgttgcagcagaaagtggaaaaagaaggggcggatcagccgtcaattctgccgtaatggtgttttaaatccgttctgttaaaaaaaccgtggcgtatttgcgctgcggttttttttgcctgtttcacaggcaactgaatacggtttggttgtagaaagcgttctgacatatactttgtattaatagttaatacgtggagatcgcttatgcgcaaaattacctcagtaagcgttggcgaacaattagatagttttattacccggatggtccagtctggtcgttatggctcggccagtgaagtaatgcgttcggcacttcgtctattggaacaacaagaatccagggatgaagctgtcagaaatgctgttattgaaggtcttgagagcggtgaaagttcgatgacgcttcgtgatatcgcagcagaaaggaagcaaaaacatcgtgtataagcttagcggaaaagctgttgaagatttcagagggatctatgactacacgctgggaaagtttggtgatgagcaggcggatcgctataccgactctctcggcacttttctggatacactctctcaaatgcccgagatagggcaagactatgatgcgattccagaggtaaagaagatcgcatttaggtttcacactgtttattacgttataagagtcgatgacattctcattgcgcgcattcttcatcagttgatggaacctcgccgtcactggtaatgtgagaatttcttgactcaggattgcgaaaatccccgcatcttgggaaactgcgcgtaaccctacatttcatccaggtaacttttcatggctatcatcccaaaaaactatgcgcggttagaaagcggctatcgcgaaaaagcattaaaaatctatccgtgggtctgcggtcgctgttcccgcgagtttgtttattccaacctgcgtgaacttaccgttcaccacattgatcacgaccataccaataacccggaagatggcagtaactgggaattgctttgtctctattgccacgatcatgagcattcgaaatataccgaagcggatcagtatggtacgaccgttatcgcaggggaagatgcgcagaaagatgtcggtgaagcgaagtacaacccattcgctgacctgaaagcgatgatgaacaagaagaagtgattaaaacgtaaaattgcctgatgcgctacgcttatcaggcctacgttatttcagcaatatattgaatttacgtgcttttgtgggccggacaaagcgtttacgccgcatccggcatgaacaaagcgtacgttgttaacaatctgaaatgccgggaataaatcccggcattttcataatcagaagttgtaacctactaccaggtaaccaccccagccggtagagcgaacgttgaagttgccgttgccgaagttcagttctgcatcgtcgttccactgaccaccgtcgtgccagtaacgagctacgacagagtagtgccagtgatcgtagttcagagccagaatatggctggaagcgatagagttattagtacgggtcttaataccgttgattgcgtnaccgctgtcatcccctaaatcggaaccccagtcgaagttggtgaagccgatgtagctcagctgaccgccccacagatcggtaatcggcacaaagtatttaattttgaaacggtaaccgtcccactcgttttcgttcgctgcgccatagttctgccactggtatttcgcatagacgttcatggacaggctcatcggcaggccagtgtcgatatcggtacccagacccatgtaccaggtgctctggcgaccatctttattacgacccatgtcgtaaatgtagttgttcgcgaagtaccactctttgaacggaccgaagctaaggtcagtattggtcagcttgtcgatggagaaacgtggttcgatttccataaacagaggagaaccgtggttccagataccttttgcatcggagttaccgccgaagaataccggcgcatccgcataaccatagaagtcgaaccagtcttttttagcgaatgcttcgtactcaaggtaggtatcgttgcggatctgcggtccgaaacgggtgtgatagcttccgacaacgttaacgctctggtgccaccagtcggaaagatactgcggtttgtcgttttcagctgcgttgacagtaaaagacgaagagagcgccagtaccgcaccggctgccagtaatgtttttttcatatgtatgccactgtttgaaaatcccttgcgggagtgaaaaaggcgcaaattgcgtttctaaatatttcgtatacagaggagcctattataaaaatcattgctcacaaaaatatgtttcgtttcacagttctatcatttacgtaatcgattgcgttcacgtttacacacattcgggcggggattgtactgactttcgcccttgttgcaaacttttactatcaatctgggttatgtaagcggagtaacaaaatgatggggaaggatgttgcgggacgcacaaaatcgccccgctataagtttactgcataacaggttgaatgtcgtggatacgtacaaagcctaactgatccacagaaatcccctttaactgtaacggaatatcaacatcgctgggggcgaggacgctggcaggggcattaatcaattgattctgtacattgatttcctgaaagttgtctattgttccctgaatttgcccatattcaacagttccgctgaatgcgggcaagggatcattcgactcaccctgaatacgtagtgtcagggtggtgccatctgtatcaggcgtaatattcaccagcgacatacgtaaagtaccgatctggctttccagtcttgccggtgttttcgctccaggcagaaggtaaaccccactgctggattttgcattcagcctgttttgctgagtgattttgactgtttcttgattgagttgcgtcatctcctggttcagcgtgctgacgctgtgtttcatctgtcgcacttcactttgctgcacacaggcgctaaggctgaataggcttcccagcaggatcagtcgaaaaacgttaatattcataggtcgtccctttctcgtcgcaattagcctaatggtagagggtaaaagcagcgaaagcatcgatcctttatctcaaaagcgttgcgcctttgttgtatcgtcagttcagggtaaaatagatttccgttaaccacctggtcaggacgccgtatgcattgcccattctgtttcgccgtggacactaaggtaattgactctcgtctcgtgggcgagggttcatccgtacgccgccgtcggcagtgtctggtgtgtaatgaacgtttcaccacctttgaagtggcggagctggttatgccgcgtgttgtaaaaagcaacgacgtgcgtgaaccgtttaatgaagaaaaattacgtagcggaatgctgcgggcgctggaaaaacgtccggtgagttccgatgacgtcgaaatggcaatcaatcatattaaatcgcagcnnnnnnnnaccggtgagcgcgaagtgccgagcaagatgattggcaatctggtgatggagcaattgaaaaagctcgataaagtcgcctatatccgttttgcctctgtctaccgcagtttcgaagatatcaaagaatttggcgaagagatcgcgcgcctggaggactaagccgtgcaggacgagtattacatggcgcgggcgctaaagctggcgcaacgaggacgttttaccacccaccccaacccgaatgtcgggtgcgtcattgtcaaagatggcgaaattgtcggtgaaggttaccaccaacgagcgggtgaaccacatgccgaagtacacgcgttgcgtatggcgggtgaaaaagccaaaggtgcgaccgcctatgtcacactcgaaccctgtagccatcatggtcgtacgccaccgtgctgtgacgcactcatcgccgctggcgtagcgcgcgtggtcgctgcgatgcaggacccgaacccgcaggtcgctgggcgtggactttaccgtctgcaacaggctggcattgacgtcagccacggcctgatgatgagtgaagccgagcaattgaataaaggctttctcaagcggatgcgcaccggctttccttatattcagttaaaacttggcgcatcgcttgatggccgcacggcgatggcgagcggcgaaagccagtggatcacttcgcctcaggcgcggcgcgacgtacaacgactgcgcgcacaaagtcatgccattttaaccagcagcgctacggtgctggcggatgatcctgccttaacggtgcgttggtctgaactggatgtacaaactcaggcgctctacccgcaacatcatctccgccagccggtacgtattgtgattgatagccaaaatcgcgtgacgccggaacatcacattgtgcagcagcccggcgaaacctggttcgcgcgtacgcaggaagattctcgtgagtggccggaaacggtgcgtaccttgctgattccagagcataaaggtcatctggatctggttgtactgatgatgcaactgggtaaacagcagattaacagcatctgggtggaagcggggncaacgctcgctggcgcattgctgcaggcggggttagtcgatgagctgattgtctatatcgcacctaaactattaggcagcgacgcccgtggattatgcacactgccagggcttgagaaattagctgacgccccccaatttaaattcaaagagatacgtcatgtaggcccggatgtttgcctgcatttagtgggtgcatgatctcccggctcgaaagggaagcagcgcacgaaatattatgctaaaatccgcccccctgcggggccatactcgaacccgaaggaagaaaatgaacattattgaagctaacgttgctaccccggacgctcgcgtcgccatcaccatcgcgcgtttcaacaactttatcaatgacagcctgctggaaggtgcaattgatgcactgaaacgtatcggtcaggtaaaagatgaaaacattaccgttgtttgggtgcctggtgcctatgagctgccgctggcggcgggtgcactggctaaaaccggtaaatacgacgcggtgattgcgctgggtacggttattcgtggtggcactgcccattttgaatatgtcgctggtggtgcaagcaacggcctggcgcatgttgcccaggacagcgaaattccggttgcttttggggttctgaccactgaaagcattgaacaagcgatcgaacgtgctggcaccaaagctggcaacaaaggtgcagaagctgcactgaccgcgcttgaaatgattaatgtattgaaagccatcaaggcctgaaattagtaaggggaaatccgtgaaacctgctgctcgtcgccgcgctcgtgagtgtgccgtccaggcgctctactcctggcagttgtcccagaacgacatcgctgatgttgaataccagttcctggctgaacaggatgtaaaagacgttgacgtcctgtacttccgtgagctgctggccggggtggcgactaataccgcatacctcgacggactgatgaagccatacctgtcccgcctgctggaagaactgggacaggtagaaaaagcagtactgcgcattgcgctgtacgaactgtctaaacgtagcgatgtgccatacaaagtggccattaacgaagcgatcgaactggcgaaatcgttcggcgcagaagacagccataagttcgtcaacggcgtactcgataaagcagcacctgtgattcgccctaacaaaaagtaatatccaggccggtagattcacggaagactgttccgcgatcgccggccttttcttttttacctgctgaggcataacgtatggcatgtggcgagttctccctgattgcccgttattttgaccgtgtaagaagttctcgtcttgatgtcgaactgggcatcggngacgattgcgctcttctcaatatccccgagaaacagaccctggcgatcagcactgatacgctggtggcgggcaaccatttcctccctgatatcgatcctgctgatctggcttataaagcactggcggtgaacctaagcgatctggcagcgatgggggccgatccggcctggctgacgctggcattaaccttaccggacgtagacgaagcgtggcttgagtccttcagcgacagtttgtttgatcttctcaattattacgatatgcaactcattggcggcgataccacgcgtgggccattatcaatgacgttgggtatccacggctttgttccgatgggacgagccttaacgcgctctggggcgaaaccgggtgactggatctatgtgaccggtacaccgggcgatagcgccgccgggctggcgattttgcaaaaccgtttgcaggttgccgatgctaaagatgcggactacttgatcaaacgtcatctccgtccatcgccgcgtattttacaggggcaggcactgcgcgatctggcaagttcagctatcgatctctctgacggtctgatttccgatctcgggcatatcgtgaaagccagcgactgcggcgcacgtattgacctggcattgctgccgttttctgatgcgctttctcgccatgttgtaccggaacaggcgctgcgctgggcgctctctggcggtgaagattacgagttgtgtttcacggtgccggaactgaaccgtggcgcgctggatgtggctctcggtcatctgggcgtaccgtttacctgtatcgggcaaatgaccgccgatatcgaagggctttgttttattcgtgacggcgaacctgtcacgttagactggaaaggatatgaccattttgccacgccataaagatgtcgcgaaaagtcgcctgaagatgagtaatccgtggcatctgcttgctgtcggattcggaagtggattaagcccaatcgttcctggcacgatgggatcgctggcggcgattccgttctggtatctgatgacctttttgccctggcagctctactcgctggtggtgatgttggggatctgtatcggcgtctatctttgtcatcaaacggcgaaagacatgggggtgcacgatcacggtagcatcgtatgggatgagtttattggcatgtggatcaccctgatggcgctgccgaccaatgactggcagtgggtcgccgccgggtttgtgattttccgtattctggatatgtggaagccgtggccgatccgctggtttgatcgcaatgtacatggcggcatggggatcatgatcgatgatattgtcgccggggtgatttccgcaggcatcctgtactttatcggtcatcactggccgctgggtattctttaaatgccattgaccgggaggtgtaggcgattccagaccacccggtttgatttataaatgaacagtgccccaattttggggcactctgttaaagtaaaacccgacatcgccgaatatactatgcggcgatatttcaaggtgtatctttgtcactcataattcaatgacactgaaatatcgtcagtcgacgaactcataataattgctcatattctctgactgttgacgaaaaatatcatcaaaattattctcaatggtttcggtcatagtgttgaataaatttttagaaagttcatctattttgtcttgaatctttgattttatttcatcttgaatttcacgggtaaccaaaagttggtccaattgatcatccattttgtattttgcaattaattgtgcagttaaaggtactttcttcaaataatcattttttgttagtttatactggtctttgaaatattgtttggcttctgcttgtatatatttaaaaaattcattatactttttcctgcttatttttccttgaagattcattgcgcgattgaatattttctttaaatgctgattgtagaaaataaaattatcgatatcttgttttattttaataactgttgatttttcttcaaagtttaatgactcagggtttttatctgattcaatatagtcaagaataatttttgctaatgggctaatgtctttttcttctgttgattctgcttctgtttttaatatcggattaaaaaggtcggtacggtaaagtttcgtgcctttcatcctgacgatgtcaggaagaatagtgtttgaaagattagcctcgctaaagtccacattttggcaatcactttctgataaatctgcccaattgaaagtggttttcacacaggagcagttagttagaatcatccctttcgtttcattcccatctgatttctgataagttatcctttgtattatttgatctgcttctggatattgcatctcaggttctttttctttaccatatatcatcgcattatcaagaattgcgccagtgcaattcatatttgtcaggtcgcatttcttaaatctacaattgttaaaattcgcatttgtacaattcgcatttgtaaacttgacgccataaaaataagtatgttcgaagttgacatttgagcagttacagtttcccatatctataccgaaatctatatcgggatctttattgggatctttaccggaaatattgctgtgtgctagatatagaccgctgaaatcgtaatatccattgtcatccttttctattgggagtgaataagtctttactacctcgttaacaatagagatagttccacgtatcatcagattttctccgtctttataaaaaataatgttatgtttgatggtactgttgtatggctctggcaatgaggatgcaattttattccagaaacaacaaagcgtggtctgtttttgtttgggcgagaggcgatcaaaattcagctttaaatatgagtctaaatctgacgttgcatctatattaaagttgggatctggagttaacgctgaattataatttagaactgacaatgtattgatgtatttatgaatcgatttaaatgccttttgtttatcactgtccagaaaaaaatcacgaattttgttccacagcctttcaataagattttgatttaaatcttgcttcattgagtttcttaaatctgcaaccggtacatcagtaaacaggatcggttgtttggtgatggttttcatcatgattgtaatcctcttacgttgactaaataagacagttttaggggatattacctggagaaactatcaaaaatcgctcaaagggatgaagacgatgaatagctgcaaactcattcacgaagaatttctcttgcagaggtggattatggttacagaaggtgatgggaggtacgttgtccccatcatcgcagacgatggggaattcagcagataaaatgggtgaaaagcgaaatttacttaaatcctacgaccggatgcggtttatacggtgtttccagttcagcaatctgttccggcttcaaagtgatatccaccgcgttcagcagctcatcaagctgttcttcccgcgaagttccgataatcggtgcggcaatgcccggtttactcaacaaccaggccagcgcaacttgtgctcgtgttgcaccgagttcttcactgacgcccgttaaccgctctgcgatctgcgcgtcattttcatcgctttctttatagagatttttccccacctcatcagacaccagtcgtgcggtagtttctccccacggacgcgtcagtcncccccgcgccagcggactccacggaatgaccgccacgccttcctgataacacagcggcagcatctcgcgctcttcttcgcgataaatcagattgtagtgatcctgcatactgacaaactgcgcccagccgtgctgtttttgtagttccagtgcctgagcaaactgcgaagcgtgcatggatgacgcgccgatataacgcgctttcccggcttttaccacgtcgttgagggcttccagcgtctcttcgatcggcgtgttgtaatcccagcgatgaatttgcaggatatcgacataatccatgccgagacgtcgcaggctgtcgtcgatagagcgcaaaatttgtgcacggaataatccttccggtaaatcaccaacgcgatggaacactttggtggcaacgaccacgtcttcacgacgggagaaatcccgcagtgcgcgaccgacgatctcttcgctgctgccatcggaatagctattggcggtatcaaagaaatttatgccgccttccagtgcgcgtttaatgatgggacggctgctctcttccggcagtgtccatgcgtgattaccacgatctggctcgccaaaggtcatacagccgaggcaaagtcgggaaacgcgaaggtcggtttttcctaaggggttgtattgcatgctgccactcctgccatgaataatttcttaagcatagcaggagtggagtaggggttatgccagccaggccttgattttggcttccataccggcggcatcgaggccgagttcggcgcgcatttcttcctgagttccttgcggaataaagaagtccggcaggccaatgttcagcacgggtactggtttacgatgggccatcagcacttcgttcactccgctgcctgcaccgcccataatggcgttttcttctacggtaaccagtgcttcatgactggcggccatttccagaattaacgtttcatcaagcggtttcacaaaacgcatatcgaccagcgtggcgttcagcgattcggcgactttcgccgcttctggcatcagcgtaccaaagttaaggatcgccagtttctcgccacgacgcttcacaatgcctttgccaattggtagtttttccagcggcgtcagttccacgccgaccgcgttgccacgcgggtagcgcaccgctgacgggccatcgttatagtgatagccggtatagagcatctggcgacattcgttttcatcgctcggggtcataatgaccatttccggtatgcagcgcaggtaagagagatcaaaagcgccctggtgggtttgaccgtcagcaccaacaatgcccgcgcggtcgatggcgaacaggaccgggagtttttgaattgccacgtcatgcagcacctgatcataggcgcgttgcaggaaggtggagtaaattgccacgatcggtttgtagccaccaatcgccagaccggcggcaaaggtcaccgcgtgttgctcggcaatcgctacatcaaaatagcgatccgggaatttacgtgaaaactcgaccatgccggaaccttcacgcatcgccggagtaatcgccatcagtttgttatctttcgctgccgtttcgcacaaccagtcgccaaagatttttgaatagcttggtaaaccaccgctacttttcggcaaacaaccgctggagggatcaaatttaggcacggcgtggaaggtgattgggtctttttctgccggttcataaccacgaccttttttggtcatgatatgcaggaactgcgggcctttcaggtcgcgcatgttcttcagcgtggtgataagccccagcacatcgtgaccgtcaaccgggccgatgtagttaaagcccagctcttcaaacaacgtgccaggcaccaccatgcctttaatatgttcttcggtacgtttgagcagctctttaattgnnnnnnnnnnnnagaaaanttttttcccgccttcgcgcagtgaagagtaaagcttaccggaaagcagctgcgccagatggttgttaagcgcgccaacattttcggaaatcgacatttcattgtcgttgaggaccaccagcatatcaggacgaatatcgcccgcgtgattcatcgcttcaaacgccatgcctgcggtaatcgcgccgtcgccaatcacacagacggtgcggcgatttttgccttctttctcggcagcaaccgcaataccaattccggcactgatggaggttgatgaatgcccgacgcttaatacgtcatattcgctttcgccgcgccacgggaacgggtgtagaccgcctttctgacggatggtgccgattttgtcgcggcgtccggtcaaaatnttatgcggataagcctgatgccccacatcccaaatcaattggtcaaacggggtgttatagacatagtgcagcgccacggtcagttcgaccgtgcccagcccggaggcgaagtgcccgctggaacggctcacgctgtcgagtaaatagcggcgcagttcgtcgcagagtttcggtaaactctcttttggcaacagtcgtaactcctgggtggagtcgaccagtgccagggtcgggtatttggcaatatcaaaactcatcaggggcctattaatacttattgtttatttattacgctggatgatgtagtccgctagcgcttccagtgccgaagtatcgatcgactgttcagccagttgtttcagcgactggcgggcatcgtcgatcagatcctgggctttcttccgggcttgctcaagacccaggagtgcagggtaggtacttttgccaagctgctggtcggcaccctgacgttttcccaacgttgcagtatctcccaccacatccaggatgtcatcctgaacctggaaggcaaggccgatgctctctgcgtacttgtcgagtactggtagagcacgacgtcctttatctccggcgcttaatgcaccaaggcgaacggcggcgcgaattaatgcgcctgttttatgacgatgaatacgctcaagcgcgtccagaggtacgtgtttgccttccgcgtctaaatccaacgcctgaccaccacacattccggcaataccgctggcgctcgccagttcagaaatcatcgaaattctgtcgcgatccgacacttctggcatatcagcatcgcttaaaatcgagaacgccagcgtttgtaaagcgtcgccagcgagaatcgcgttcgcttcgccaaacttcacatggcaggtcggcaagccgcgacgcagatcgtcatcatccatcgccggtaaatcatcatgaattaatgagtaagcgtggatacactctacggcggcagcgggtgcgtccagcgtgtttgtgctaacgccgaacatatgaccggtggcataaaccaggaaaggtcgcaggcgcttaccacctaataatgcgccatactgcatggtttcgaccacgggagtgttctgaaagggcagtggggcgataaaacggctcagcgcctggttggcctgcttaacgcaggcttcgagttgctgcggaaagtccattactcattgtccggtgtaaaaggggttagagaggcgtcttcgttgtcagacagcagaatttgtacgcgctgttcggcttgttgtaatttggcctgcccctgacgtgccagctgcacgccgcgttcgaactcgttcagcgcctcttccagcggcaggtcgccactttccagacgggttacaatctgttccagctcgctcagcgccttttcaaagctggcgggcgcctcatttttcttcggcataatgaatgtctgactctcaatatttttcgccccgtcatggtaacggactcagggcaaatagcaaataacgcgcaatggtaaggtgatgtgcgcagcaaagcgatgttagtggtatacttccgcgcctggatgcagccgcaggtgtgggctgctgtatttttccctatacaagtcgcttaaggcttgccaacgaaccattgccgccatgaagtttatcattaaattgttcccggaaatcaccatcaaaagccaatctgtgcncttgcgctttataaaaatccttaccgggaacattcgtaacgttttaaagcactatgatgagacgctcgctgtcgtccgccactgggataacatcgaagttcgcgcgaaagatgaaaaccagcgtctgactattcgcgacgccctgacccgtattcctggtatccaccatattctcgaagtcgaagacgtgccgtttaccgacatgcacgatattttcgagaaagcgttggttcagtatcgcgatcagctggatggcaaaaccttctgcgtacgcgtgaagcgccgtggcaaacatgattttagctcgattgatgtggaacgttacgtcggcggcggtttaaatcagcatattgaatccgcgcgcgtgaagctgaccaatccggatgtgactgtccatctggaagtggaagacgatcgtctcctgctgattaaaggccgctacgaaggtattggcggtttcccgatcggcacccaggaagatgtgctgtcgctcatttccggtggtttcgactccggtgtttccagttatatgttgatgcgtcgcggctgccgcgtgcattactgcttctttaacctcggcggcgcagcgcatgaaattggcgtgcgtcaggtggcacattatctgtggaaccgctttggcagctcccaccgcgtgcgttttgtcgctattaatttcgagccggtagtcggggaaattctcgagaaaatcgacgacggtcagatgggcgttatcctcaaacgtatgatggtgcgtgccgcgtctaaagtggctgaacgttacggcgtacaggcgctggtcaccggcgaagcgctcggccaggtgtccagtcagacgctgaccaacctgcgcctgattgataacgtctctgatacgctgatcctgcgtccgctgatctcttacgacaaagagcacatcatcaacctggctcgccagattggcaccgaagactttgcccgtactatgccggaatactgcggtgtgatctccaaaagcccgacggtgaaagcggttaagtcgaagattgaagcggaagaagagaaattcgacttcagcattctcgataaagtggttgaagaagcgaataacgttgatatccgcgaaatcgcccagcagaccgagcaggaagtggtggaagtggaaaccgtcaatgacttcggcccgaacgacgtgattctcgatatccgttctgtcgatgaacaggaagataagccactgaaagtcgaagggattgatgtggtttcactgccgttctacaagttgagcaccaaatnnnnnnatctcgaccagaacagaacctggctactgtggtgtgagcgcggggtaatgagccgcctgcaggcgctctatctacgcgaacagggctttaagaatgtgaaggtgtatcgtccgtaatttgtggtttttacgtcgcatctggtcagatgcgacgtttgccgcatccgacactactcgtaataattataaatccctgccgccatcaccagttgtgatgccacttcatgggctttctcgcgcccaaccagcaggtcgataattttcagaccaaagtcgatagctgtacccggcccctggctggtcagcaattttacccgtgcatcccagacgacgcgcttgtcctgccattgttcagcgggaattttgtctttcagcgtcgggaagccggtcatattgccaatcggaaagatatcgtgcggcaccagcacggtggctggcgcggcgcaaatagccgcgacgatacgcccggaacggtggaactgtttaacggtttcaaccagcagggtactatcgcgaaaacactccgcgcctttaatgccaccaggcagcacgatcacgtcatattcgccatcagccacttcgaccagcggcgcatccgccagcagcttcacgccgcgcgagcaggtaatcgccaggttgccatcgctggctacgctggcagtggtgactttgataccgccgcgaatcaagaggtcgatcgtggtgacggcttcagtctcttcactaccaggggcgaggcaaaccagtgccgatgcgctcatattcactctcctttctttttaccatttcaaacaggcgggtgttttccggtacggcaatcccatgcgcgcgggcgcggcgtaagagaaaaccattgatatagtcgatttcggtgtggcgcagcgcgcggatatcctgcaacatcgacgagatattttccgctgtggcatcaatcacctgcatcacgtaatcacgtaaatcttccgctgaagtatgatgcccttcgcgttcgatcactgccgcgacttcttcgcatatttgcataatttcttgcggatgatgacgtaattcaccgttcgggcaattccagatggcagtcagtggattaatcacacagttgactgccagcttgcgccacagctcggcgcgaatattgttatgccaggcaacgtcaggcaacacggtttgcaatatatccgccagataactgtaatcgccgtcctgttgccgtgctggaccaatatgcgtgataccgtttgccacatgaataatgacattgccgtcgcggcaggcggcatgggtggtggtgcccatcagtaatggctgctgaatgttttgcaattcttcgatggtgcccatgccgttgtgaattaacagtattggcgtagttacaggcagtgtggacgcgaggcttttgacggcatcggaaacctgccatgctttcagcgtcaccaggagcagatcgctggtggcaagaaaatcgggatcgttggcggtcagcgattcgttaaatatcgaaccatcagtctcaaccagattcacactacaataaggttgcggtacgcgcagccagccctgaacttcgtgaccctgtttacaaagtgctgtaagccataattgccctaaggcaccgcatcccaatacggtaattttcattgttcctcctcacccgcaaccactccgggtgttcaataaggctatcccttaattgtgcatgctgttgcgactatgcacaattaagggatacgtcctggtgcaggactgttggttatttaactttgcaggtattatgcttcgcatcaaaaatgaagggagaggaaaagatgccatctttcgatattgtctctgaagttgatcttcaggaagcacgtaacgcggtcgataacgcgagccgcgaagtggagtcccgttttgacttccgtaacgttgaagcctcatttgagctgaacgacgccagcaaaaccatcaaagtgttgagcgagtccgacttccaggtcaatcagttgctggatattctgcgtgccaagctgctgaagcgcggcattgaaggcagttcactggatgtaccggaaaatatcgttcatagcggtaaaacctggtttgtggaagcgaaactgaaacagggcattgagagcgccactcagaaaaaaatcgtcaagatgatcaaagacagcaaactgaaagtgcaggcgcaaattcagggcgatgagatccgtgtgacgggcaaatctcgtgatgatttacaggctgtcatggcgatggtgcgcggtggcgatctcggtcagccgttccagttcaaaaacttccgcgattaatcgcgacaacctgcgctttgttcatgtcagatgcggcatgaacgcctggttcggcctacaaagttttgtaaatcaggaacttagtaggcctgataagcgtagcgcagcaggcaatttcgcctcgcttttatgcctggcgaattgcctgttcaacatcaaagcgattcgtcactttgctgtcgattttcacataagctgaatgttcttcttctgcaatcaacacttctttgatgccttcagtttccagcaaacgcacttttaacgcctcgtttgcggcaatgttcgccgggatttcaatgcgcaaactgctgacatacggcggttctttcatggtactggcgactgccagccacactgcggccagcattgcgccagcgagaaataccccctgaccgtcaaacatgccgtcaatccagccgcccagcgaaccgccaatcgccacgccaagaaactggctggtggagtaaacacccatcgccgtacctttgtaacctgctggcgactctttactgataagtgagggcaggagggcttccatcaaattaaacgccacaaagaaaagctgcacgccgaccaccagttgccagaactgcgtttgcgcgttcctcaacacaatttccgcaaccacgatcaacccgacgcagaagacaaagacttgcttcattttgcgcttaacttcagcgtagataatgaaaggcacgaccgagccaaaggcgattagcattgtcgccagatagaccttccagtgttcagccgccgggaaccccgcatcagccagttgtccgggcagggcaacaaacgtcgacatcagcaaaatatgcagacacataatgccaaagttgagtttcagcagccgcggttccgccagcaccttactgaaactgcctttcaccattccggactcacgattaagtacgtgagtgctactgttgggcacaacccaaatggtcaacgcaatgccggtcgttgccagaatagcgatcatccagaacagcgcgtgcagcccaagtttgtgagtgatgatcgggccaagcaccatcgcaatggcaaaggtaatgccaaagctcacgccgataaacgccattgctttggtgcggttttgttcgcgcgtgagatcggaaagcagcgccataacggcagcggcaatcgcaccggagccttgtagcgcccgacccagaataattccccagatggagtcagagagcgcagcgataacgctaccggcggcaaacactgccagcccaccgacaattaatggtttgcgaccaatgcggtcggaaagcaggccaaacggaatctgaaaaacggcctgagtcagaccataaataccaatggcaataccgattaatgcttcgctggcaccttgcagagccatgccgtacgtggtcagaaccggcagaaccatgaacatgcccagcatgcgcaacgagaatacggtccctaaaccccaggtcgcgcgccgctcacctggcgtcattttataatcgttcattaccacctctgttttaaattcgcgactagtgtaaagcggcaaacgaatggggtaaacatgcggattttttagtaaatatttcgagagggatatgtttctaatgctaagaaaaaaggtgccgtagcacctttttaatagagaggttgtgttaccacacagcagccagcagcgtatgcgagtccggcaccataaaatcaacggacatcatcaccgagagggcagtgatggcgatgatagagaagccgaacagcttgcgcgcccagattctgtcatcagcaactttataaccgcgcagagccatacctaaccaccagacgctaaccgccgcggcgaccaccagatacttatatccagcgtaaccgccaagagagagcatcagcgtggcaacggcaaaggcgatgatatacagcgtgatgtgattcttcgccaccgaaatgccttttaccactggcaataccggaatgtttgccgcctggtaatccttaaagcggaaaatggcgatggcataggagtgaggcatctgccacaggctgaagatagccagcaggatcgctgcgccgctatcgaactcgccggttactgcacagtagccaatcaccggcggcgcagcgccggagagcgaaccaatcaatgtgccgtagactgagtggcgtttcatgtacaggctataaacgccgacataaaccacaaagcccatcacccccagccagcaggccagcggattcgcgccaaaccacagcagcataaagccagcaatacccagcaaggtggcgtacaccagcgagacagcaggagagatcaggcctttaaccagcacccgattcttcgtcctttccatctttctgtcgatatccctgtcgatgtagttgttaaacacacaacccgacgccacaaccagtgacaccccaaccagcgtgtagataaacaggggataatcaatgctgccctttgaggccagcaggaatcccccaatcaccgagatcaggttgccaaagatgatgcctggtttcgttacttgcaggtattgcttaaacatcataaccgccgctcttagtgcatcatcatgttgtagttgaggttccacataatccagatggagcctacaaccaggatagcgatgattagcacggtgaagacaaacgccgtcatgttccagccttcatctgatttggtattcatgtgcaggaagcacaccagatgcaccagaacctgtaccactgccattgccaggattgttcccagaattacggccggagaggcagcccctgtcatcaccatccagaacggaatcaccgtcagaatgatcgacaggataaagcctgtcatgtaggtttttacgctgccatgggacgcgccgctgtgatcggtagaatgactcattacatcgcccccatcagataaacaacagtgaacacacagatccaaaccacatccaggaagtgccagaacaggctcaggcacatgatgcgggtacggttagtgctggtcaggccgcgacgagcgatttgtaccatcagcaccgccatccagataagaccggaagtgacgtgcagaccgtgcgtgccgaccagcgcaaagaacgctgacaggaagccgctgcgatccggacccatgccgttaacaatcaggtgatggaattcgtagatttccatcccgataaatccggcgccaaacaaccaggtcaacgccagccaggagataacctggcttttgttgtttttgtacatggcgatagccgccatgccgtaggtgatggagctgaacaacagcaagaaagtttcaaccagaacgaacggcagttcgaaaatgtccttacctgtcgggccgcctgcggtgccgttcaccagaacggcataggtagcaaacaagatagagaacagaatgcagtcgctcatcaggtagatccaaaatccgaagattttggttccgcctgcatcgtggtgcccgtgttcgtgcgcgtggacagtcgcgtgcgtcaaagtatcagttgccatttttcagccctgccttagtaatctcatcgaaatgctggttttccagtttttcgatttctgccaccggcacgtagtaatccacgtcctcgtcgaagcttttcacgatccaggtgatgatcatgcctgcgaagccaacaatcgccagccaccagatatgccagatcatggcgaaaccgaagatggtggagaaagccgcaatgacgatacctgcaccgctgtttttcggcatatgaatttcttcatagtggtcaggctttttatacgcttcgcctttctctttcatttcccagaatgcatcacgctcgtgaacgtgcggcacaacggcaaagttatagaacggaggcggggaagaggttgcccactccagcgtacggccaccccacgggtcgccagtcaggtcacggttctggtcgcggtcacgaatagaaacgtacatctgaataacgaggcagagaatacctagcgcaatcagtactgcaccgctggctgcaatcatcagcatggtgtggaactgcgggtcaatctgctggctcaaacgacgggtcatgcccatgaagcccagcgcgtacagtggcataaaggcaacgaagaagccgatgatccagaaccaaaacgcgcgtttaccccaggtttcgttcagtttgaaaccgaacgctttaggccaccagtaggtcatccctgcgaagcagccgaagaccacgccgccgatgatcacgttatggaagtgcgcaatcaggaacaggctgttatgtagaacgaagtccgcgcccggtactgccagcagcacgccagtcataccgcccaccgagaaggtgacgataaaaccgatagtccacagcatcgcagaatggaacacgatgcggccctgatacatggtgaacagccagttgaagatcttcaccccggtcgggatggcgataatcattgtggtgataccaaagaaggcgtttacgttcgcgcccgcacccatcgtaaagaagtggtgcagccaaacgatgaacgacagcacggtgatacagacggttgcccataccagcgaggtataaccaaacagacgtttacgcgagaaggttgccgcaatttcggagaacacaccgaaaacaggcaggatcaggatgtaaacttccgggtgtccccaggcccaaatcaggttgatgtacatcatcatgttgccacccatatcgttggtaaagaaatgggtgcccagatagcgatccagggtcaacaacgcgacggtaaccgtcagaattgggaaggaagcaataatcagtacgttcgcgcacagtgatgcccaggtaaatactggcatcttgaacatggtcatgcccggtgcgcgcatcttcagaatggtaacgaagaagttgataccggtaagcgtcgtacctataccggatagctggagactccatatccagtaatcgacaccgactcccggactgtactctattcccgatagcggtggataggccagccagccggtctgcgcaaattcgcccacnccgagagaaacgttaaccagaatcacaccaacaacggtaaaccagaagcttaagttgttgaggaacgggaacgcaacgtcacgcgcgccgatctgcagcggaaccaccaggttcatcagaccgataacgaaaggcatcgccacgaagaagatcataatcacgccgtgcgcggtgaagatctgatcgtagtggtgaggtggcaggaagcccgcttcgcccgccgaggcaagagcctgctggctacgcatcataatggcgtcagcaaaaccacgcagcaacatcacaatcgccacgatgatatacatgataccgaggcgtttatggtcgacggaggtcagccactctttccacaggtaggtccacttaccgaagtaagtgatcaggccaacgagcgccagacctcccaaaataatgccagcgatcgtaaccatgacgataggttcatggaacgggactgcatcaagtgataattttccgaacatctttattcttcctcaacccctttaatgggcggattccgcgtggctcatgtccatgccttccataccttcgtgtgcgctgtgctcaccttctggctgggtcatgtccatgctcttaccgtgagccataaacttgttaattacatcggcaaacaagtctggtttcacgttggagaaatattccacctggttgtattcgctaggcgcggccagtttttcgaacgctgccatgtcagacatggagttcggcgactgtttcgcttttgcgacccactggtcgaatgcggcgcgatccggtgttgcaatagctttgaacttcatgcctgagaagcccgggccgctgtagctggcggagataccgtcataagtgccgggttcgttggcgatcagatgcaggcgagtctgcataccggccatggcataaatctggctacccagacgcggaatgaagaaggagttcatcacggagttggaggtcactttgaagtacaccggagtgttcgccgggaangcgatttcattcacggtagcaaagccctgttccgggtagatgaagaaccatttccagtccatggaaaccacttcgatggtaatgggcttctcgtcgtgtgccagcggcttgctaggctcaagagcgtgagtggttttccaggtcagtaccgcaaggaagatgatgattaagataggtaccgtccagaccacagcttccactttattggagtgtgaccagttcgggctgtacttagcatctttattgctcgcacggtacttccaggcgaaaccaacagccatcaagattgcgggaataacgacaatcaacatcaggccaaatgccgtcagtatcagtgaacgttgctccagaccaatctgtcctttgggatctaacagcgcagaattacagccactgagcaatacagtgcctgcaaataatgacaaccatcccaaacttttattgtatttcctgagtctcatttaacgacctcaattccacgggatctggtggcgtttaaagtgtgtgggcattttacgggaaggttacattactgtaaacatgattaaattcctgttacttggatttggctgtcaggtcacatatgttgcaaaacatatcaggttgattttaagaagctgttgcaaaagggcgttataacaaaaggggagtgcagaagaagtctggacgggcaattggtataaccaatgcgaaataaaacaattatttaacaaataattatcattggagtgacaacttggtggtgagaaaataaagactcattagctgaatcgtgtaagaaaaatagaatttataaatggcgccaataatttccaaacgctaagccgcacaaaagaacaaatattaataagcgatgctgatgtttatttagccgtaataattacggcgagtgattactacagctaaataatatttacagattacgtcagatgcgtttttcgtagcgccagataatccagcaaaccaccaagcacgacgccagaaagggcgactaaaaccccgacttccagcagagcaggcaggaaagagaagtgcgtcaaatccagcgcgtccatcgtcaatagcagtaaccacacggccaacaggctgacgcccgccgccagtgtccacatggcaaaggcataacctgccggatatgcggtacgggagataaagttgtcatttactcgtgtatattcaagcgtctggcggcaaaccagcagcaaaataagccctggtacggcagcggcgacggagaatagatagaatgtcgaccagccgtgtgcttcaacaaaccaacccgccacggggccgacataaactcgccctacagcagaaagcgctgagagcagggcaaattgagtagcggaaaatgacttattacatagcgtcattaacagcgcgacaaaggctgatgtgcccatcccgccacagaggttttcgaaaaagacggctgcgcccatgctgtagagatgcttatcagtaatcgacagcagccagtaaccagcgttagacgcaccttgtaaaatgccgaaaatcagcagtgcccggaacagtgacaggcgctgcatcaaaatcccaccgtacaatgcgccaacaatggtcgctagtaagccaagcgttttgtttaccacgcctacttcacccgcatcaaacccgacgccgcgaatcaaaaacgtggttgtcaggctcatggcgaatgcgtcgcccagcttatacagcacgataagaagcaaaataagccaggcattattgcgaccaaagaaatctcgcagaggtgcaacaaccgcttgttccagcgttttgggcacaggaatggtgtcggttggttctggtgcaagcaacgtcgcgataatacaggggatcaacagcgccgccatcaaccagtacatgccctgccagcccagccatttatctgccagccacagggctaggccgccggaaaccagcatccctaaacggtaacccagaacgctgattgccgcgcccgcaccacgttcttctgccgggagcacatcggttttccacgcatcgaagacaatatcctgggaggcagagcaaaaagcgatcaccaccgccagcgccgccatccagcggagttgggtgcctggttcgagaaaacccatcgccncaatggcgactaataacaggatttgcgtggcgagcagccaaccgcgccgccgcccaaaaaatgggggcgtgtagcggtccatcagcggtgaccagaggaatttaaaaacgtaagcctggcctaccagagagaagaaaccaatggttttgagatcgatattctcgaccgtcatccaggcctgtaaggtgccggatgtcagggcgagcggtagcccggaagcaaaacccaggatcagcaatatggctgaacgcggctgttgaaaaatacgtaaatattgactggacatgggcgtctacaggcccggcttgcaccgggccagagggcagaaattaacgcgcgttctgcttgatgaattcgtgaatgctggtgtcctgagacatatcagcgatggtatcggtcagcacactgttaaccgcatcggcgatatttttgttggaggcctggaacgcaccttcaacgttgtagctggcacgatagtttttggtcattttgttgccattctgcgcggtagcgatgatggcgatatccgctttggtagcgatgttgtagcgcacgttgccctgggacacgtcagcatacagctggctaacgatgatttgcagattaaccgggccattcggaccaaccatgtaaccacgcgcggtcatctgtttttccagcacttcttgcagcaggaaacgcagatcgcgggaggcggtcagggtaacgatttgattatcgcgggtgacttttgccagcgcctgatcggtacgctgatcggcaccattaatgcttacggtgacgcccatcaggcttggatcctgctgtggcagtgtaatcgtcggggaaacttcaatagttgttggcggtcttgcgcatcctgcaagcataaacagagcaactaacgggaagaggatttttttgaacatgttcgggctctcagagactcttaagcgtgtttggtaaaaattcccgccatcataacattgccaacggcgaggggaagtaggtaaggcatgtaaattcatcatgttgacgaaataatcgcccctggtaaaagaaacgctgatgcgaggcctgtgtttcaatctttaaatcagtaaacttcatacgcttgacggaaaaaccaggacgaaacctaaatatttgttgttaagctgcaatggaaacggtaaaagcggctagtatttaaagggatggatgacatctcagcgttgtcggaggagatatttcatgatgatacgtgagcggatagaagaaaaattaagggcggcgttccaacccgtattcctcgaagtagtggatgaaagctatcgtcacaatgtcccagccggctctgaaagccattttaaagttgtgctggtcagcgatcgttttacgggtgaacgttttctgaatcgtcatcgaatgatttacagtactttagcggaggaactctctactaccgttcatgcgctggctctgcatacttacactattaaggagtgggaagggttgcaggacaccgtctttgcctctcctccctgtcgtggagcaggaagcatcgcgtaaaaacgcatttgcaactgtcggcgcttttccagtatgttgctaaagattttatgaaaaacggcctgcgggccgttttgttttgtctggattttgcgctttttgcccagcattcagacgaaaattgcccgggaattgtgaaaaaatacgcgacagcgcgcaataaccgttctcgactcataaaagtgatgccgctataatgccgcgtcctatttgaatgctttcgggatgattctggtaacagggaatgtgattgattataagaacatcccggttccgcgaagccaacaacctgtgcttgcggggtaagagttgaccgagcactgtgattttttgaggtaacaagatgcaagtttcagttgaaaccactcaaggccttggccgccgtgtaacgattactatcgctgctgacagcatcgagaccgctgttaaaagcgagctggtcaacgttgcgaaaaaagtacgtattgacggcttccgcaaaggcaaagtgccaatgaatatcgttgctcagcgttatggcgcgtctgtacgccaggacgttctgggtgacctgatgagccgtaacttcattgacgccatcattaaagaaaaaatcaatccggctggcgcaccgacttatgttccgggcgaatacaagctgggtgaagacttcacctactctgtagagtttgaagtttatccggaagttgaactgcagggtctggaagcgatcgaagttgaaaaaccgatcgttgaagtgaccgacgctgacgttgacggcatgctggatactctgcgtaaacagcaggcgacctggaaagaaaaagacggcgctgttgaagcagaagaccgcgtaaccatcgacttcaccggttctgtagacggcgaagagttcgaaggcggtaaagcgtctgatttcgtactggcgatgggccagggtcgtatgatcccgggctttgaagacggtatcaaaggccacaaagctggcgaagagttcaccatcgacgtgaccttcccggaagaataccacgcagaaaacctgaaaggtaaagcagcgaaattcgctatcaacctgaagaaagttgaagagcgtgaactgccggaactgactgcagaattcatcaaacgtttcggcgttgaagatggttccgtagaaggtctgcgcgctgaagtgcgtaaaaacatggagcgcgagctgaagagcgccatccgtaaccgcgttaagtctcaggcgatcgaaggtctggtaaaagctaacgacatcgatgtaccggctgcgcttattgacagcgaaatcgacgttctgcgtcgccaggctgcacagcgtttcggtggcaacgaaaaacaagctctggaactgccgcgcgaactgttcgaagaacaggctaaacgccgcgtagttgttggcctgctgctgggcgaagttatccgcaccaacgagctgaaagctgacgaagagcgcgtgaaaggcctgatcgaagagatggcttctgcgtacgaagatccgaaagaagttatcgagttctacagcaaaaacaaagaactgatggacaacatgcgcaatgttgctctggaagaacaggctgttgaagctgtactggcgaaagcgaaagtgactgaaaaagaaaccactttcaacgagctgatgaaccagcaggcgtaatttacgcagcataacgcgctaaattcgcacaaaggcccgtcaccgccaggtggtgggctttttttgtcatgaattttgcatggaaccgtgcgaaaagcctctttcggtgttagcgtaacaacaaaagattgttatgcttgaaatatggtgatgccgtacccataacacagggactagctgataatccgtccataaggttacaatcggtacagcaggttttttcaattttatccaggagacggaaatgtcatacagcggcgaacgagataactttgcaccccatatggcgctggtgccgatggtcattgaacagacctcacgtggtgagcgctcttttgatatctattctcgtctacttaaggaacgcgtcatttttctgactggccaggttgaagaccatatggctaacctgattgtggcgcagatgctgttcctggaagcagaaaacccagaaaaagatatctatctgtacattaactccccaggcggggtgatcactgccgggatgtctatctatgacaccatgcagtttatcaagcctgatgtcagcaccatctgtatgggccaggcggcctcgatgggcgctttcttgctgaccgcaggggcaaaaggtaaacgtttttgcctgccgaattcgcgcgtgatgattcaccaaccgttgggcggctaccagggccaggcgaccgatatcgaaattcatgcccgtgaaattctgaaagttaaagggcgtatgaatgaacttatggcgcttcatacgggtcaatcattagaacagattgaacgtgataccgagcgcgatcgcttcctttccgcccctgaagcggtggaatacggtctggtcgattcgattctgacccatcgtaattgatgccagaggcgcaactgtgccgctatacttatccagggcggcacaacgctgtaagcggcttgcgcctgagaatggcatttgcgtcgtcgtgtgcggcacaaagaacaaagaagaggttttgacccatgacagataaacgcaaagatggctcaggcaaattgctgtattgctctttttgnggcaaaagccagcatgaagtgcgcaagctgattgccggtccatccgtgtatatctgcgacgaatgtgttgatttatgtaacgacatcattcgcgaagagattaaagaagttgcaccgcatcgtgaacgcagtgcgctaccgacgccgcatgaaattcgtaaccacctggacgattacgttatcggccaggaacaggcgaaaaaagtgctggcggtcgcggtatacaaccactacaaacgtctgcgcaacggcgataccagcaatggcgtcgagttgggcaaaagtaacattctgctgatcggtccgaccggttccggtaaaacgctgctggctgaaacgctggcgcgcctgctggacgtcccgttcaccatggccgacgcaaccacgctgaccgaagccggttatgtgggcgaagacgttgaaaacatcattcagaagctgttgcaaaagtgcgattacgacgtacagaaagcgcagcgcgggattgtctacatcgatgaaatcgacaagatttctcgtaagtcagacaacccgtctattacccgtgacgtttccggtgaaggcgtacagcaggcactgttgaaactgatcgaaggtacggtagctgctgttccaccgcaaggtggacgtaaacatccgcagcaggaattcttgcaggttgatacctctaagatcctgtttatttgtggcggtgcgtttgccggtctggataaagtgatttcccatcgtgtagaaaccggctccggcattggttttggcgcgacggtaaaagcgaagtccgacaaagcaagcgaaggcgagctgctggcgcaggttgaaccggaagatctgatcaagtttggtcttatccctgagtttattggtcgtctgccggttgtcgcaacgttgaatgaactgagcgaagaagctctgattcagatcctcaaagagccgaaaaacgccctgaccaagcagtatcaggcgctgtttaatctggaaggcgtggatctggaattccgtgacgaggcgctggatgctatcgctaagaaagcgatggcgcgtaaaaccggtgcccgtggcctgcgttccatcgtagaagccgcactgctcgataccatgtacgatctgccgtccatggaagatgtcgaaaaagtggttatcgacgagtcggtaattgatggtcaaagcaaaccgttgctgatttatggcaagccggaagcgcaacaggcatctggtgaataattaaccattcccatacaattagttaaccaaaaaggggggattttatctcccctttaatttttcctctattctcggcgttgaatgtgggggaaacatccccatatactgacgtacatgttaatagatggcgtgaagcacagtcgtgtcatctgattacctggcggaaattaaactaagagagagctctatgaatcctgagcgttctgaacgcattgaaatccccgtattgccgctgcgcgatgtggtggtttatccgcacatggtcatccccttatttgtcgggcgggaaaaatctatccgttgtctggaagcggcgatggaccatgataaaaaaattatgctggtcgcgcagaaagaagcttcaacggatgagccgggtgtaaacgatcttttcaccgtcgggaccgtggcctctatattgcagatgctgaaactgcctgacggcaccgtcaaagtgctggtcgaggggttacagcgnnnncgtatttctgcgctctctgacaatggcgaacacttttctgcgaaggcggagtatctggagtcgccgaccattgatgagcgagaacaggaagtgctggtgcgtactgcaatcagccagttcgaaggctacatcaagctgaacaaaaaaatcccaccagaagtgctgacgtcgttgaatagcatcgacgatccggcgcgtctggcggataccattgctgcacatatgccgctgaaactggctgacaaacagtccgttctggagatgtccgacgttaacgaacgtctggaatatctgatggcaatgatggaatcggaaatcgatctgctgcaggttgagaaacgcattcgcaaccgcgttaaaaagcagatggagaaatcccagcgtgagtactatctgaacgagcaaatgaaagctattcagaaagaactcggtgaaatggacgacgcgccggacgaaaacgaagccctgaagcgcaaaatcgacgcggcgaagatgccgaaagaggcaaaagagaaagcggaagcagagttgcagaagctgaaaatgatgtctccgatgtcggcagaagcgaccgtagtgcgtggttatatcgactggatggtacaggtaccgtggaatgcgcgcagcaaggtcaaaaaagacctgcgtcaggcgcaggaaatccttgataccgaccattatggtctggagcgcgtgaaagatcgcatccttgagtatcttgcggttcaaagccgtgtcaacaaaatcaagggaccgatcctttgcctggtanggccgccgggggtaggtaaaacctccctgggtcagtccattgccaaagccaccgggcgtaaatatgtccgtatggcgctgggcggcgtgcgtgatgaagcggaaatccgtggtcaccgccgtacttacatcggttctatgccgggtaaattgatccagaaaatggcgaaagtgggcgttaaaaacccgctgttcctgctcgatgagatcgacaaaatgtcttctgacatgcgtggcgatccggcttccgcactgcttgaagtgctggatccagagcagaacgtggccttcagcgatcactacctggaagtggattacgatctcagcgacgtgatgtttgtcgcgacgtcgaactccatgaacattccggcaccactgctggatcgtatggaagtgattcgcctctccggttataccgaagatgaaaaactgaacatcgccaaacgtcacctgctgccgaagcagattgaacgtaatgcactgaaaaaaggtgagctgaccgtcgacgatagcgccattatcggcattattcgttactacacccgtgaggcgggcgtgcgtggtctggagcgtgaaatctccaagctgtgccgtaaagcggttaagcagttactgctcgataagtcattaaaacatatcgaaattaacggcgacaacctgcatgactaccttggtgttcagcgtttcgactatggtcgcgctgataacgaaaaccgtgtcggtcaggtaaccggtctggcgtggacggaagtgggcggtgacttgctgaccattgaaaccgcatgtgttccgggtaaaggcaaactgacctataccggttcgctcggcgaagtgatgcaggagtctattcaggcggcgttaacggtggttcgcgcgcgtgcggaaaaactggggatcaaccctgatttttacgaaaaacgtgacatccacgtccacgtaccggaaggtgcgacgccgaaagatggtccgagtgccggtattgctatgtgcaccgcgctggtttcttgcctgaccggtaacccggttcgtgccgatgtggcaatgaccggtgagatcactctgcgtggtcaggtactgccgatcggtggtttgaaagaaaaactactggcagcgcatcgcggcgggattaaaacagtgttaattccgttcgaaaataaacgcgatctggaagagattcctgacaacgtaattgccgatctggacattcatcctgtgaagcgcattgaggaagttctgactctggcgctgcaaaatgaaccgtctggcatgcaggttgtgactgcaaaatagtgacctcgcgcaaaatgcactaataaaaacagggctggcaggctaattcgggcttgccagcctttttttgtctcgctaagttagatggcggatcgggcttgcccttattaaggggtgttgtaaggggatggctggcctgatataactgctgcgcgttcgtaccttgaaggattcaagtgcgatataaattataaagaggaagagaagagtgaataaatctcaattgatcgacaagattgctgcaggggctgatatctctaaagctgcggctggccgtgcgttagatgctattattgcttccgtaactgaatctctgaaagaaggggatgatgtagcactggtaggttttggtacttttgccgttaaagagcgtgctgcccgtactggccgcaacccgcagaccggtaaagagatcaccatcgctgccgctaaagtaccgagcttccgtgcaggtaaagcactgaaagacgcggtaaactaagcgttgtccccagtggggatgtgacgaagttcaagggcgcatctactgatgtgccttttttatttgtattcggtgactttctgcgtcttgtgggctgacaattgcccccgtttcttgtcacaataggcctttgcgcgcatcgatacgttgcgtgaggtacacagtcatctacagcggagtgttgttacaccatgatggacagcttacgcacggctgcaaacagtctcgtgctcaagattattttcggtatcattatcgtgtcgttcatattgaccggcgtgagtggttacctgattggcggaggcaataactacgccgcaaaagtgaatgaccaggaaatcagccgtgggcaattcgagaatgccttcaacagcgagcgtaatcgcatgcagcaacagctgggcgatcaatactccgagctggcagcgaacgaaggctatatgaaaaccctgcgtcaacaggtgctgaatcgtctgatcgacgaggcgctgctggatcagtacgcacgtgagctgaaactgggtatcagcgatgagcaggttaaacaggcgattttcgcgaccccagccttccaggttgatggcaaatttgataacagccgctataacggtatcctcaaccagatggggatgaccgccgatcagtacgcccaggcgctgcgtaaccagctcactacccaacagctgattaacggcgttgctggtaccgattttatgctgaaaggtgaaaccgacgagctggcggcactggtcgctcaacaacgcgtggtgcgtgaagcgactatcgatgttaacgcgctggcggcgaagcagcctgtgaccgaacaggaaattgccagctactacgaacaaaacaaaaacaatttcatgacgccggaacaattccgcgtgagttacatcaagctggatgccgcaacgatgcagcaaccggttagcgatgcggatctccagagctactacgatcagcatcaggatcaattcacccagccgcagcgtacccgttacagcatcatccagaccaaaactgaagatgaagcgaaagcggtacttgatgagctgaataaaggcggtgattttgctgcattagccaaagaaaaatctgccgatattatctctgctcgtaacggcggcgatatgggttggttagaagatgccactatcccggatgaactgaaaaatgctggtctgaaagaaaaaggccaactgtctggtgtcatcaaatcttcggtcggtttcctgattgtacgtctggacgacattcagccagcgaaagtgaaatcgttagacgaagtacgtgacgatgtcgcggcgaaagtgaaacacgaaaaagccctcgatgcgtactacgcgctgcagcagaaagtgagcgatgcggcaagcaacgacaccgagtctctggccggtgcagagcaagctgccggcgttaaagccactcagacgggttggttcagcaaagagaacctgccggaagagttgaacttcaagccggttgctgacgctatctttaacggcggtctggtaggtgaaaacggcgcgccgggcatcaactctgacatcatcaccgtagacggcgacctcgcattcgtgctgcgcatcagcgagcacaaaccggaagcggtgaaaccgttggcagatgttcaggaacaagttaaggcactggttcagcacaacaaagctgaacaacaggcgaaagtggatgctgagaaactgctggttgatttgaaagccggcaaaggtgcggaagctatgcaggctgccggtctgaaatttggcgagccgaaaaccttaagccgttccggtcgtgacccgattagccaggcggcgtttgcactgccactgccagcgaaagacaaaccgagctacggtatggcgaccgatatgcaaggtaatgtggttctgctggcgctggatgaagtgaaacaaggttcaatgccggaagatcagaaaaaagcgatggtgcagggtatcacccagaacaacgcacaaatcgtctttgaagctctgatgagtaacctgcgtaaagaggcgaaaatcaaaattggcgatgcgttggaacagcaataatcctgaagccgcctcgcaaaaaaatgctttgcagctgtaacaagaaaaggtcgctttcgcggccttttccatttctgaacattgccatttgtttactgttttcactgccgttaaggtgattccactgttaacaaacaannnagaaaacagtatgaaacacggaattaaagcactgctcattaccctgtccctggcctgtgccggaatgtctcatagcgcgctggcggcagcttctgtggcgaaaccgacggcggtagaaaccaaagcggaagctcctgcagcacaaaataaagcagcagtaccggcgaaagccagtgacgaagaaggctcccgggtcagcattaataatgccagcgcggaagagctagcccgcgcgatgaatggcgttggcctgaagaaagcgcaagcgattgtcagttatcgcgaagagtacggtccgtttannnnggtggaggatctaaagcaggtgccggggatgggcaattcgctggtggaacgtaatctggcggtattaaccctgtaattaatttgcatagtggcaattttttgccagactgaagaggtcataccagttatgacctctgtacttataacagtttttataaaaacaacgtaaggttattgcgctatgcaaacacaaatcaaagttcgtggatatcatctcgacgtttaccagcacgtaaacaacgcccgctaccttgaatttctcgaagaagcccgctgggatgggttggaaaatagcgacagttttcactggatgacggcccataacatcgctttcgtggtggtgaatatcaatattaactatcgtcgtccggcggtattaagcgacttgttaaccattacgagccagttacagcaattaaacggtaaaagcggcatcttaagccaggtcattacactggagccggaagggcaggtggtagcggatgcgcttattacgtttgtttgtattgatcttaaaacgcagaaagcattagctctggaaggggaattgcgcgaaaagctggagcagatggttaagtaaacgttttgtggtgccggatgctcaagccgcatccggcgacacccggaataattacttcaacccggttttctgcttcatcgctgccatcaccgtcggtttatcggccagataatgattcaaaccgttggcgcgtaaattacatgccgcacaatgaccgcaaccgtcgcctttaatgccgttatagcaggtcaacgtttcgttacggactaaatccagtttgccgtaataatctgccagcgcccaggtttccgctttatcaatccacatcagcggcgtttcaaaacgaatatctttcgccatgcccaaactgacggcatggtttagtactttcacaaactcatcgcggcaatccgggtagccggagaaatccgtttcgcagacgccggtaattacggcttctgcttttacctgatacgcatatattgccgccagcgtcaggaacaaaatattacgccctgggacaaacgtattcgggatgccatcggcttcaggttcataatcaggcaccggaatgctgtcacgcgtcaggctgctgaccgccagctcgttgagcagcgttacatcaagaaccttatgcgcgcgtgcccccagtttcagcgccagttcgcgtgccacgtcgatttctgcgcgatggcgctgaccgtaatcgaacgtcacgcaatggacttcatcatattgttgtaatgcctgcaccagacaggtggtggaatcctggcctccactgaacacaacgacagcacgtttcatagataatcctgcttgaacaataaaagcgttatggtaacgcctgcgattaacccggaccagctattcattgcgacggcgcgggaagccaggcttcggtaaattcaaaccagccgcgcggtgtcagtcgcacaccgttcacgccgggaggggcactaatgcgatagtgatagttgaacagcggcgtcagcgtcgcatctgtcattaactggctaaaaaccgctttcagggcattaaatcggttttcctcatcaggcattacttgcaccgcgtccagtgtcgattgtagatgtgcgtatgctggagcgtcgaaaacatgtggccacagcggatcgcagcgcagccattgctccagagtatattccggtgcttcgccaattaatctgtcgcccatcatgaggtctgcgtgtgccagtagggtcgtgtcgtcccagttttttgcgttntgaaaaataattgtgagttcacagccttccgctgccagtgtcgcctgtaggcgttctgccatggtatgaagttctatcgggaggtgataaaccagcgtcaaggttttcggtagtttgacttcatccggtacttgccaatgcggaatagtccagcctggcagtaatgcatgactggcggtgatcaggttttctccgacttctaacgtttgtaataaaccggattgatgaataatggagatcacttttcgcgcctgccagagggagagtcggggacttttgcgcaacgttaaatagcaaaaacctaaactgatgccactactgacctggctgacccgttgcagctcctccggtttgccgatggtgatttgcacgggatgccgacaactggttcccaaatctttttcgaaaagcggcggagttatccagtactcaaccgctttaagcagcggatgacgtaaatggtaataatcatggctttccaggcgcaccagttcagctgtgaattgtgttaagcgaaaaggacccgtgccaatcagtgggaattgcggatgcgccagatggctgcaatagctcgccagccggtgcgcaagccagtaatcggggcgatgtaaaaagaaggtcagacactgcggatgggtgacctcaatacgcttcacgctaataaataattgatccagtgctggcagttgtaacagcatcaataatcgctggtgtaagtgtgaggcttttactgcatcgccgttatgccagtgtagggttgaacgaagataaaagtcccagcgtaacccgtcagcagaggtttcccagtgatgcgctaaatcgccaatcgggcgctgggtattattatcgaagcgggtcaggccggaaaatatctgtccggcgagatgctgctcggcacggccgggcaaaaagcccggttgtagcggttcgagcgggcgatagtagggaatacgcaacgtgggtgtatcgttttgccattgtccgcccataaacggctgtaacagagtgcgcagctcacctggggccagttgcgccagctccagcacatcttgctgctttccggtttccagtgccttttccatcatcgcattgcgtagcgattctggcgtgaccagaaagcgtaattgtccgcgctttccgcgtcctgactgcgcctgccactccagccatcccgcttcctgtgcctgacgcaacagcgtacgaacatggcgttcgctgcaaaaacagcgttcggccagttcgctgacggtgacggtttgcggctttccggcggaaggttgccacagacgttgatactggttaaggcggttgagcagtcgcataaaaacccggaacaatattatttaactattcactattacttccgtatatatcaggtgatactcaatcaccattaaccgtgtcacagagtggagaaagaaatggctcgtctggcagcatttgatatggatggcactttattgatgcctgaccatcatttaggtgagaaaaccctctctactttggcgcgactgcgtgaacgcgacattaccctcacttttgccacggggcgtcatgcgctggagatgcagcatattctcggggcgatatcgctggatgcgtatttgattaccggcaacggaacgcgcgtgcattctctggaaggtgaacttttacatcgtgatgatttacctgcggatgtcgcggagctggtgctgtatcagcaatgggatacccgagccagcatgcatattttcaatgacgacggttggtttaccgggaaagagatccctgcgttgttgcaggcatttgtctatagcggttttcgttatcaaataatcgatgtcaaaaaaatgccactcggcagcgtcaccaagatctgcttctgtggcgatcacgacgatcttacacgtttgcagatccagctatacgaagcattaggcgagcgtgcacatttgtgtttttccgccacggattgccttgaagtgctgccggtgggctgcaataaaggcgctgcactgacggtgctgacccaacatttaggtttatcgttgcgcgattgcatggcctttggtgatgcgatgaacgatcgcgaaatgttaggcagcgtcggtagcggatttattatgggcaatgcgatgccgcaactgcgcgcggagctcccgcatttaccggtgattggacattgccgaaatcaggctgtctctcactatttgacgcactggctggactatccacatctaccttattcccccgaataacgagatcccttccagcaccgggcaattgcccggtttttttgcgttgaatttgtcattttgtgccgtggtgtttaaaccgcacagaataaattgtcgcgatttcacctttaaaatagaattaaaagagaaaaaaattctccgtggaagggctatgttagataaaattgaccgtaagctgctggccttactacagcaggattgcaccctctctttgcaggcactggctgaagccgttaatctgacaaccaccccctgctggaagcgcctgaaacggctggaggacgacggtatccttatcggcaaagtcgccctgctggatccggaaaaaataggcctcggcctgaccgcctttgtgctgataaaaacgcaacatcacagcagcgaatggtattgccgctttgtcacggtggttaccgaaatgccagaagtgctggggttctggcgcatggctggtgaatacgattatctgatgcgcgtccaggttgccgacatgaaacgctacgacgagttttataagcgtctggtaaacagcgtgccggggctgtcggacgtcacttccagcttcgcgatggaacagattaaatacaccacttctttacccatcgaataaatatccagaatcaggtcaggacacaacgcgtgcgattatttgctcaattaagctggtatttccgtcgggaatggcgtcgctatctcggggctgtcgccttgcttgtcattatcgcgatgctgcaactggttccaccaaaagtggttggtattgttgtcgatggcgtgacagaacaacactttactaccgggcagatcctgatgtggatcgccaccatggtgctgattgccgttgtggtttatctcctgcgttacgtctggcgcgtattgctgtttggtgcgtcttatcaactggctgttgaactgcgtgaagattattaccgtcagctaagccggcagcatcctgagttttacctgcgtcatcgcacgggggacctcatggctcgtgcgactaatgacgtcgatcgcgtcgtgtttgccgccggagaaggggtgctgacgctggtggattcactggtaatgggctgcgctgtgttgattatgatgtctacgcaaattagctggcagttgaccttatttgccctgttaccgatgccagtgatggcgatcatgattaagcgcaacggcgatgctttgcatgaacgctttaagctggcacaggcggcgttttccagtcttaatgaccgcacccaggaaagcctcaccagtatccgcatgatcaaagcctttggtctggaagatcgccagtcggcgttatttgccgcggatgccgaagataccggcaaaaaaaacatgcgggtggcgcgtattgatgctcgtttcgacccgaccatctatatcgcgattggtatggcgaacttgctggcgattggcggcggtagttggatggtggtgcagggcagtttaacgctgggccagctcaccagttttatgatgtatttaggtctgatgatttggccaatgctggcgctggcatggatgtttaacattgtggaacgtggtagtgctgcgtacagccgtattcgcgcgatgctggcggaagcgccggtggtgaacgatggtagcgaacccgtgccggaagggcgtggcgaactggatgtaaatattcaccagttcacgtatccgcagactgaccatcctgcgctggaaaacgtcaatttcgccctgaaacccggtcagatgctgggtatctgcgggccgactggttccggcaaaagtaccctgttgtcgctcattcagcgtcatttcgacgtcagcgagggggatattcgctttcatgatattcctctgacgaagttacaactcgatagctggcgtagccgcctggcggtagttagccagacgccattccttttttctgacaccgtggcgaataacatcgcgctgggttgcccgaatgccacccagcaagagattgagcatgtcgcgcggttagccagcgtacatgacgatattttgcgtctaccgcaaggttacgatacagaggtgggcgagcgcggtgtgatgctttccggcgggcaaaaacagcgtatctccattgctcgtgcgttattagtcaacgcggaaatcctcatccttgatgatgcgctttcggcggtggacggacgcactgagcaccagatcctgcataacctgcgtcagtgggggcagggaagaacggtaatcatcagtgcccatcgcctttctgcactgacggaagccagtgaaattattgtgatgcagcacggacatatcgcccagcgtggcaatcatgatgtgctggcacaacaaagcggctggtatcgcgatatgtatcgctatcaacaactggaggcggcgctcgacgacgctccggaaaatcgcgaggaggccgtcgatgcgtagttttagccaactgtggccgactctcaagcgcctgttagcgtacggttcaccgtggcgtaaaccgctggggattgcggtcctgatgatgtgggttgcggcggcggcagaagtcagtgggccgctgcttatcagctattttatcgacaatatggtagcgaaaaataacctgccgttgaaagtggttgcagggctggctgcggcgtatgttgggctgcaactgtttgccgccgggctacattacgcgcagtcgctgctgtttaatcgggcggcagtaggcgtagtgcaacagttgcgtaccgacgtgatggatgctgcgttacgccagccattaagcgagtttgatacccaacccgtcgggcaggtgatttcccgcgtcactaatgacactgaagtgatccgcgatctctacgttaccgtagtggcaactgtcctgcgcagtgccgcactggtgggcgcgatgctggtggcgatgttcagcctcgactggcgaatggcgctggtggcgataatgattttcccggtggtgctggtggtaatggtgatataccagcgttacagcacgccaattgtccgtcgtgtgcgcgcctatatggcggatatcaacgacggctttaacgaaatcatcaatggcatgagcgttatccagcagtttcgtcagcaggcgcgatttggcgaacgtatgggtgaggccagtcgttcacactatatggcgaggatgcaaaccctgcgcctcgacggttttctgctgcgtccgctgctgagtctgttttcatcgctcattctctgtggcttgttgatgctgtttggcttctccgccagcggcaccattgaagtgggcgtgttgtatgcgtttatcagctatcttgggcgacttaacgaacccttaatcgaactgaccacgcagcaggcgatgctgcaacaggctgttgttgctggtgagcgcgtgtttgagctgatggacggaccgcgccagcaatatggcaatgatgatcgcccgttacagagtggcaccatcgaagtcgataacgtgtcatttgcttatcgcgatgacaatctggtgctaaagaacattaatctctctgtgccttcgcgtaactttgtggcgctggtcgggcataccggcagtggtaaaagtaccctcgccagtttattgatgggctattacccgctaacggaaggtgagattcgccttgatggtcgtccattaagttcgctaagtcacagcgcgctgcgccagggcgtggcaatggtgcagcaagatccggtggtgctggcggataccttcctcgccaacgtgacgctggggcgggatatctccgaagaacgcgtctggcaggcgctggaaaccgtgcaactggcggagctggcacgcagtatgagcgatgggatttatacgccgctgggcgagcaggggaataatctctctgtcgggcaaaagcaactgctggcactggcgcgcgtgctggtcgagacgccgcaaatcctgatccttgatgaggcaaccgccagcattgactccggtactgaacaggcgattcaacatgctctggcggcggtgcgtgaacataccacgctggtagtgattgctcaccgcttatcgactattgttgatgccgacactattctggtgcttcatcgtgggcaagccgtggagcagggcactcaccagcaactgctggcggcccagggacgctactggcagatgtatcaactgcaacttgcgggcgaagagcttgcagccagcgtgcgtgaagaagaatcattgagcgcctgaatagcgcaatatctcatcgttggtgcaaaaatgtaacgcactgtgcactgtcatagtgcgttttcattttcaatcttcttaacttcctgctctctttctcgtttttcatttctggcacaccgcttgcaataccttcttcgtgtagcagaaccattaccgaattctgaccggaggggatctatgaagctggtgaccgtgataatcaaaccattcaagctggaagacgttcgtgaagcgttatcttccattggtattcagggcctgaccgtcaccgaagtgaaaggtttcgggcgtcagaaagggcatgccgagctgtaccggggggcggaatacagcgtcaacttcctgccaaaagtaaaaattgatgtggcgattgctgatgaccaactcgatgaagtgatcgatatcgtcagtaaggcggcttacaccggaaaaattggcgacggcaaaatcttcgtcgctgaattgcaacgcgtcattcgtattcgtaccggcgaagccgacgaagcggcgctgtaatctctggcacacagcaacaggaacgaaaaatgaagatagcgacgataaaaactgggcttgcttcactggcgatgctgccgggactggtaatggctgcacctgcggtggccgataaagccgacaatgcgtttatgatgatttgtactgcactggtgctgtttatgactattccggggattgccctgttttacggtgggttgattcgcggcaaaaacgtgctgtcgatgctgacgcaggtgacggtgacgtttgcactggtctgtattctctgggtggtttacggttactcgctggcgtttggtgagggcaacaacttcttcggcaacattaactggttgatgctgaaaaacatcgaactgacggcggtgatgggcagcatttatcagtatatccacgtagcgtttcagggatcgtttgcctgcattaccgtaggcttgatagttggggcgctggcggaacgaatccgcttctcagctgtgttgattttcgtggtggtatggctgacgctctcttacattccgattgcgcatatggtgtggggcggtggtttgctggcttctcacggtgcgctggatttcgcgggtggcacggtggtgcatattaacgccgcaatcgccggtctggtgggcgcgtatctgataggcaaacgcgtgggcttcggtaaagaggcgtttaaaccgcacaacctgccgatggtcttcaccgggactgccattctctatatcggttggtttggctttaacgccgggtcagcgggcacggcgaatgaaatcgcggcactggcatttgtgaatactgtggtcgcaacggcggcggcaattcttggctggatcttcggtgaatgggcgctgcgtggtaagccttcactgctgggagcgtgttctggcgcgattgccggtctggtcggcgtgacgccagcgtgtggctacattggtgttggcggcgcgttgattatcggcgtggtagctggtctggcgggcttgtggggcgttaccatgctcaaacgcttgctgcgggtggatgatccctgcgatgtcttcggtgtgcacggcgtttgtggcattgtcggctgtatcatgaccgggatttttgccgccagctcgctgggcggcgtgggcttcgctgaaggtgtgacgatgggccatcagttgctggtacagttggaaagcattgccattacgattgtgtggtctggtgtggtggcatttatcggctacaaactggcggatctgacggttggtctgcgtgtgccggaagaacaagagcgagaagggctggacgtcaacagtcacggcgagaatgcctataacgcataacaagcactgcaaaaaacagccggacggttttcacctccggctatttttttaattgtgattacgcatcaccccttcctgaacggtcgaggcaaccagtacgccgtcctgggtataaaactcaccgcgcacaaagccacgtgcgctggacgccgaggtgctctccacgctatacagcagccattcattcaaattaaacgggcgatggaaccacatggaatggtcaatggtggcaatctgaatccccggttcgagaaaaccgataccgtgcggctgtagagctaccggcaggaagttaagatcagaagcgtaaccgagcagatactgatgaacgcgcaggtcatccggcacgctaccatttgcgcggatccacacctgacgatgtggttctgcgacgtgacctttcagtgggttatgaaactccaccggacggacttccagcggacgatcgcagatgaatttatctttaagcactggcggcagcaggtgcgccagcgattgggcgatttgcgtttccgaaggcaggccatcaggcgctggcgcggacggcattgttttttgatgttcgaaccccgcttctggtgcctggaaagaggccgtcatataaaaaatcggtttgccgttttgaatagcagcaacccggcgggcgctgaagctgttaccgtcacgcagcgtttcgacatcataaataatcggcttcttactatcgccagggcgaagaaagtagctgtgaaacgaatgtaccagccgctcttcagggacggtctcttttgcagcatacaaggcctgacccacgacctggccgccaaatacctggcgtaaacctaaatcttcactctggccgcgaaagagtccttcctcaattttttccagatttaacaatgtcagtaaattttttagcgcctgactcatataactctccagtaacaaagctgccgcagcaagccaaagtgagttgagtataacgcaaatttgctactggtccgatgggtgcaatggtctgaattacgggctaattacaggcagaaatgcgtgatgtgtgccacacttgttgacgttactattttgttaaccactcttccggcgaggaaagttagcccgctggtgcattgataataaggagaaatgaatgaaactcgtgcacatggccagtggtttagcggttgcgattgcgttggcggcttgcgcagataaaagcgcggatattcagacgccagccccggctgcaaatacgtctatttcagcaacacaacaacctgctatccagcaaccgaatgtatccggtaccgtctggatccgtcagaaagtcgcactgccgcctgatgctgtgctgaccgtgacactttctgacgcgtcgttagccgatgcaccgtcaaaagtgctggcgcagaaagcggtgcgtactgaaggtaaacagtcaccattcagctttgttctgccatttaacccggcagatgttcagccgaacgcgcgtattctgttgagtgcggcgattaccgtgaatgacaaactggtatttattaccgataccgttcagccggtgatcaaccaggggggaaccaaagccgacctgacattggttccggttcagcaaaccgccgtgcctgtccaggccagtggtggcgcaacaactaccgtaccatcgacttcaccgacccaggtgaatccatcttcggcagttcctgcccctacgcaatactaagcgttactaacccctttccatctggagaggggttagtagttccagcgatagcgctgtaagtcgatttgcccgcttcccgataccatcacaccttctgccagtaatgcctgtcgttgacgctgtaaatccggtccggttagcgaaatggtgccgtggcgattaaccacccggtgccagggcaaggtgctgccttcggggagacgctttaacacaccgccaacctggcgnnnngcgcggggcgatcccgccagtttcgccacatcaccgtaagtggtgacatacccttcgggaatagcggctacgatttgccagacgcgttggggaaatgaatcttctttttccatcttttcttcctgagataatttttcagcataatctggaaaaacgcccgagtgaagccgcattgcgcaagaaaccagcatctggcacgcaatgggttgcaattagccggggcagcagtgataatgcgcctgcgcgttggttctcaacgctctcaatgggggctctgttggttctcccgcaacgctactctgtttaccaggtcaggtccggaaggaagcagccaaggcagatgacgcgtgtgccgggatgtagctggcagggcccccacccatttctgcctcccaccgtttcgtcaaaaaatcccaacatgactaaactttaaccacaactgacgtcgcaagaattgtctggctgcgcagtacgcttcggaggtatgtctgatgaagtatgttgatggttttgtggttgccgttcctgccgataaaaaggatgcctatcgggaaatggccgctaaggccgcgccattgtttaaagagtttggcgcgcttcgtattgtcgaatgctgggccagcgatgtaccggatggcaaagtgaccgattttcgtatggcggtgaaagcggaagagaatgaagaggttgtctttagctggattgaatacccttcaaaagaggtccgcgacgcagctaatcaaaagatgatgtcggacccacggatgaaagagttcggcgagtccatgccgtttgacggcaagcgaatgatctatggcggattcgagtcaatcatcgacgaataggtagcgtgacgggctgtgcggcgtgccgtcagcccaaaaattcacaaatgttgctcggcccagcgtaagaaatcttctttcggtaatgccttgctgtagagccagccctgaccgtagtgcacgccatgctggcgtagccactcttcttgtttactggtttcgattccctccgctaccattttcagtttcagtgtttttgccatttcgatgatatgcggcgtgacatttttatattccagcgcatcaacgaaagatttatcgatcttcagaatgtcgacatccagatcctgtaaataacttaaacttgaataccccgtaccaaaatcatcaagataaatttcatggcccgcctcccggtagcgagaaattatcggggcgctggttttcggatcggcaaactcgcgttcagtgagttcaagcgcgatctgtctgggattaacctgatagtgattgatcatttcacgcagcaattgcgggattttttccgaggtgagcacggtggattcaagattgatcgaaatatgctgctgtggatgctgacgcagccagtcgcccatatcttcaaagacgcttcttataatcagtagcgtcaatggctcagaaaggcccgtttgctgtgccagcggaataaaactatctggtgacaaccaactaccgtctgtctgcggccagcgcgccagtgcctcagcaccgacaattttgccattggctaaggagacaatcggctgatagtgcacgcaaatatcacgattttcgatagcatcctgcagccgatgatgcggtgactggatgcggcgcaaaatgcgcagcacaaacatcgctgccagcaggccaatcaccaacccgagcggtaaccaaataaagacttgccgatgccagcctttctgcaacattttcgatgaagcccaggtgataattgaaatattcatctccgggaagggcaggatatcgtaaatgattccattattttcgatatgctcaccgggtgttttttgtagcctggtaataattccctgagcaatttcatcgctgctggttatgacaacgttatgggcattgccaataatggcggcatcaatttgccatgagctatagggaatgacatcaataaaggaagcggggtcgatcatgacgacataatgtgccgttcccatggcgaccatgtaacggataatgcctaaatcgttatgtgatgttaaccagacacgataaccatctttcgaaattttacctggctcggggaaggtatcgggcggactttcatgctccagagacgaacactggggaacgttgttatcgatataaaccacttcctgaatatagcgataactgtaagatacccgacgcatttccatgagatgggcttcactacagtcagcgccttgccatctttccagctcttgcagcgcatctttcccttgtgtcgccaccttattggcccgaatagcgacgcgggaggaataggtatccagctcttcaataaacgatgtttctacctgctgatgggccagccagatgcttaagccgacaggcagcaatactgaaagaatcagtactcccgaaataaggccgaccagatgtcgtgttctcaccagcatatccttattaacacagtgtagggaaagtatatctgattgtggaaaaaggctggcaggagataaggaggtagagctggtatttcatgaagtgatgggtggaaacgatcgttgtcatttgaccaggcgcagagctttacgcctggtatgtaatcctaacttaagatgttgattcggcgcgagcgagggtaaaaatatcgtaaaaagacaattcacctttacggacgatcattttttgcagttgttccttatgaacatccgcgacacgcggagagttcaagatggcttcaaccagcgcggcaggtacaaagcgcgtgttgtaccattcgccgttatagcaaacgcggaaatccaacacgtcgatatcttcatagcggtagcgtgggtagacatcgaaaaagaagaaaccattaagcaggataaataatacaaccagtagccagacagagcctgaaagcgtttcggactgcaacatcaccgccagggtggcaaaaaaagcaacgtacataccgataaacagccccggatgtttacggataaaactgatactaaagcggggtttgttgtcgcgtttttcgcgggtattcagagactcaatcgtttcggtcagcaggcgttgtatttcggtcatcgtttgccttcgtggtatctgcaactttccagggaacaccctattttaacgtgggaatagtagagggaaagtaacagatctaccacaattttgcataacagttgcgnnaaaccgattacaattttttaattattctggctggattaccgcccacgacaacgttgtccgggacatcttttgtgacaactgcacctgaggctaccacgacgttatcaccaatggtcacaccagggttaatgaccgcgcgtccgccaatccagacgttattaccgatggtgacgggtttccccagttcagcaccgctattacgtgctacagggtcgatgggatgtgttgccgtgtagatatgaacgcctggtgccaacatacagttatcaccgatgcgaatagggcagacatcaagcatcacgcaatcgaagttggcgaaaaaattattaccgagaaaaatgttatagccatagtcacagcgaaacgttggctcaatataagcctctgtcacctgaccgaatagatcagcgagaatttgctggcgtaatgtgtgctcttccgccagggaatgattgtatcggtgaataagctgacgagcgcgcaggcgatcgcgagataacgtctcatctgccgagcgatacaactcaccagcaatcatcttttctttttctgtgctcattactgacctccggttgctgaaaatgcggcaacacagtaagacgaaaagtcagtgaagagaacgttcccattacatctgtgtgataaagatcacatagggtatgtcttcatggcgaaaaagtataaaattcttaataaacagccggttatagctctgaaagcgaattatttattagcgaataaatttccatactgaggaagggatcttgtcgtacagtttattcatggtcaattcggcgaggcggtgatctgcggctgagtaaaataccgccagttcattatctgataattcgtatttatttttctcgataacacgctccagcgtgtcaattgtctggcaacgacgtaaacgcattaaataatcggttttcgttaaaggtttttcggacatacttctacccatggttgtaataattctaacaagataaactcgcaggattctctttcgtcgcattgacaaaacaacggaatagtcgattacctgacttccgccatttctgaagatcctgcatattaataccataactactgaacaacataaaggtgtcatccagatattcgtcgatctgctcaatgagcttattgtcttcattatacttaattttgtaattaagtgcgaaggtcgcaatatgctcaatcagttcattcaactggaggttgatcgccgaggttgggtcgttaacccagccatgattgctttcttcaaggtttgcaaggcagtcatgatacagagtttcacagagaaacttaagctgtgcgatatcatgtcttttgggtgagtattcatccataacgcgtccccttcttagcggttgaactaacggacacctttcgggatggaaaaaacttactgacctggacttgccctctcgtttgttagcttaactataagccactctttgcaggttttcatcgcattattacgaaaaattacaattaggaaggaagcgggacagggctcactttttcatactagcaccaacccgcagcaggtaaaagcagtttgctcgaactgttcataacatttcaggattatcgccagatgaaattggtgacactaataccaggattgctctgaatatgacgtaataaccgaggaatgaataaagaattaccgcaaataattaagaatagcctctaaatgattatggattattaaatctattagcgctacttaatataaattaactaacaatcagtattttttatgaattttatacgtggttaatactggttttcgtatgagatcctgagttggtggttcaattactccttaatgttcgtaggttatgcataaaaaaggccgcttacgcggccttagtgattacacgttgtatcaatgatgatcgacagtatggttgtgctcgatatcttcattcttgcggctaaagaggcggcgaaccaccacaaagaataccggaacgaagaagattgccagtaccgttgcggtcaccatcccgcccattacaccggtacctactgcgttctgcgcgccggaaccagcaccagtactgataaccagcggcataacgccgaggataaacgccagcgaggtcatcaggatcggacgtaaacgcatccgcaccgcatcaagcgtcgcttcaatcagacctttaccttctttatccatcaagtctttggcgaattcgacgataagtatcgcgttcttcgccgacaacccaatggttgtgagcaggcctacctggaagtaaacgtcattggtcaggccacggaaggtggcagccagcaacgcaccgataacccccagcggaacgaccagcataacggagaacggaatcgaccagctctcgtacagcgccgccagacacaggaacacgacaatcaacgaaatcgcgtacagtgaaggtgcctggttgccggagagacgttcctgataggacatccccgtccagtcatagccaacaccggtaggcagtttgctcgccagttgttccatcagctccattgcttcaccggtacttttacccggtgccgcctggcctaagatttccatggatggcaggccgttgtaacgttccagacgcggcgaaccgtactcccaacgagaagaggagaacgccgagaatggcaccatctgaccatcagcagcacgaacataccagtcgccgatatcatccggcagcatacggtatttcgcttctgacatgacgtaaactttcttcacacgaccgcggtcgataaagtcgttcacatagctgccgccccatgcagcgcccagagtggtgttaatgtcgttgatagaaacacccagcgcctgcgctttttcctggtcgatatcaatcttaaactgcggggtatcttccagaccgtttggacgtacgctggtcaacatatcagggtgcttcgctgcttctgcaagcaactggttacgcgcctgagtcagtttttcgtgaccaaggccagcctggtcaatcagctcaaagtcaaagccggttgcggtacccagttccacgattgcgggcaggttaaaggcgaaaaccatcgcatctttgatttgcgagaaagcgcgtgttgcacgcatggtaatcgcttcaactttgttttcttcacccggacgatcggcccagtccttcaaggaaacgaacgcaataccggtattctgaccacgtcccgcaaagccgaagccgttaacggcgaacaccgactcaacgttgttcttttctttggtcagatagtaatgcgttacctcattgagcactttctgcgtacgttcctgcgttgcacctgctggcagctgaaccatggtcataaatacgccctggtcctcatctggcaagaaggagcttggcagacgcacaaacagataggccatgccgaccacgatgatcagatacagcaccagataacgccccgtactgcgcagaataccgcctacgctgtcggtgtagtggtgcgtgctcttctcgaacatgcggttaaaccagccgaagaagccttttttaccttccccgtgatcgcctttggcaatcggtttcagcatggtggcacaaagagctggagtcaggatcaacgccaccagtaccgacagcgccattgctgaaacaatggtaatagagaactgacgataaattgccccagtagaaccgccaaagaaggccatcggtacgaataccgccgacagtaccatcgcgataccgaccagagcgccctgaatctgccccatcgacttacgggtggcttcttttggcggcaaaccttcttccgccatcacacgctcaacgttttctaccacaacgatagcgtcatccaccaacaggccgatggcgagcaccatcccgaacattgttagcgtgtttatcgagaagccaaaggcggcaaggacggcaaaggtcccgagcaataccaccggtacggcaatggtcggaatcaacgtcgcgcggaagttctgcaggaacagatacataaccaggaacacgaggatgatcgcttcgaccagcgttttaaccacttcgtgaatagagattttcacgaacggcgtggtgtcgtacgggtaaacaattttcagacccgacgggaagaacggttccatcttcgccagttcagcacggattgccgcagcggtatccagcgcgtttgcaccggtcgccagcttgatccccagaccggaagccggttggccgttaaactctgcgatgatgtcgtagttctcaccacccagctcaatcttcgccacatcacgcagcagtacgcgggaaccatcctgattcactttcagcaggattttgccgaactcttcagtagaggtcagacgcgtctgagcaataatagaggcgttaagctgttggcctttcaccggcggtgtaccaccgagctggcccgccgcaacctgggcgttctgcgctttgatggcggtaataacatcaaccggcgttagctggaatttgttcagttcattcgggttcatccagatacgcatcgcgtactgtgaaccgaacaactgaacgtcacccacgccagacgtacggctgatggcatctttcatattcgccgccacgtagtcggagatatcctcctgcgtcatggtgccatcggtgttgataacgccgacaaccatcaggaagctgctggatgatttctcaacgctcaccccttgctgctgaacttcttgcggcagcaacggcatcgccagctgcagtttgttctgcacctgaacctgcgcgatatccgcatcagtaccagactcaaaggtcagggtgatctgtacggtacccgtggagtcactgttagaggacatgtacatcaggttatcgataccgttcatattctgttcgataacctgtgtcaccgtgtcctgcactgttttcgcatcagcgccggggtaggaggcggagatcgttactgccggcggtgcaatcgtaggatattgcgccaccggcagtttgaggatcgccagcccccctgccaacatgatgataatggcgatcacccacgcaaaaatcgggcgatcgataaagaaattaggcatgtcttaacggctcctgtttaagttaagacttggactgttcaggctgagcaccgcttgcggcttgctggttattatcagcggtaacttcttgtgcttttacctggacaccaggacgcactttctgcagcccacttattactacgcgatcgcctgctttcagaccttctgtcaccagccacttatcgccaatagcctggcttgcaacgatcggacgggtttccactttgtcatccgcgccaaccaccagtacggtggcatcgccacgcggcgtacgggttacgccctgttgcgggactaaaatagcgtttggattaagcccttcttccagacgtgcgcgcacgaacatacccggcagcagagtgtgatccgggttcgggaagatagcgcgtagggtgatagacccagtggtctgatcaacggtaacgtcagagaattccagcgtaccgtcctgcgggaacttaatgccgtcactggtgatcagcgacactttggctttgccgttctcttgtttcagcgtgccattcgccagttcctgtttcaggcgcaggaagtcgttgctggactgggtcacatcaacgtagatcggatcaagttgctgcacggttgccagcgcagtcgcctgaccgttctgtaccaatgcgccttccgtcacgttcgacttaccaatgcgaccgctaatcggagaggtgactttggtgtaagccagattgatccgcgcagtttcaacggcagctttcgccgcagttaccgcagcattcgcctgttgcgcatcagccagagcctgatcgtactcttgcttactgatgtactgagtaccgagcagtttctgataacgattcaccgtcaattgcgcgatattggctgcagcctgggctttcgccagatcacctttcgcactgtcgtatgtcgcctgataggtcgcaggatcaatctgatagagagagacacctgcttcgatgtcgctaccttctttgaaattacgcttcaggataatcccgctaacttgaggacgaacttctgcgatccggtaggcactggtgcgacccggaagctcggttgtgatctgcagaggttcagttttgactgttactacgccaacggcgggcatctgctggccaccttgttgggcctgtttgtcgtcacatcctgttagggctaagctgcctgagagcatcagaacgaccgccagaggcgtaaaccctctgtttttgttcatatgtaaacctcgagtgtccgatttcaaattggtcaatggtcaaaagttaataaacccattgctgcgtttatattatcgtcgtgctatggtacatacattcacaaatgtatgtaaatctaacgcctgtaaattcacgaacatatggcacgaaaaaccaaacaagaagcgcaagaaacgcgccaacacatcctcgatgtggctctacgtcttttctcacagcagggggtatcatccacctcgctgggtgagattgcaaaagcagctggcgttacgcgcggtgcaatctactggcattttaaagacaagtcggatttgttcagtgagatctgggaactatcagaatccaatattggtgaactagagcttgagtatcaggcaaaattccctggcgatccactctcagtattaagagagatattaattcatgttcttgaatccacggtgacagaagaacggcgtcgattattgatggagattatattccacaaatgcgaatttgtcggagaaatggctgttgtgcaacaggcacaacgtaatctctgtttggaaagttatgaccgtatagaacaaacgttaaaacattgtattgaagcgaaaatgttgcctgcagatttaatgacgcgtcgggcagcaattattatgcgcggctatatttccggcctgatggaaaactggctctttgccccgcaatcttttgatcttaaaaaagaagcccgcgattacgtcgccatcttactggagatgtatctcctgtgccccacgcttcgtaatcctgccactaacgaataaccctgaatctgactccaggatttttcctggacattttcgtcgttgctattctggttcactgcgtcgtgatattcttgcggtttgactttttcaggtcgttcttcaggttcagaaaccttcattcatcatgactatgttccagtattacaaacgatcacggcattttgttttttcagcatttattgcttttgtttttgtcttgttatgccagaacacggcgtttgcgcgggcgtcatcgaatggtgatctgccgacaaaagcggacctgcaggcgcaacttgactcactaaataaacaaaaagatctttctgctcaggacaaactggtgcagcaggatctgacagatacattagccaccctcgataaaatcgatcgcgtaaaagaagagaccgttcagctacggcaaaaagtcgctgaagcgccggaaaaaatgcgccaggcgaccgcggcgttaacagcacttagcgatgtcgataacgacgaagaaacgcgcaaaattctgagcacgctttcgttgcgccagctggaaactcgcgttgcccaggcgctggacgatttgcaaaacgcacaaaacgatctggcgtcttataacagccagctggtttcgttacagacgcagcccgaacgcgtgcaaaatgcgatgtataacgcttcgcagcagctgcaacaaattcgcagtcgtctggatgggactgatgtcggcgagactgccttacgtcccagccagaaagtgttaatgcaggctcagcaggcgttgctgaatgcggagattgaccagcagcgtaaaagcctggaagggaataccgtcttgcaggataccttgcaaaagcaacgtgattacgtgacggcgaacagcgcccgtctggagcaccagttgcagctgttgcaagaagcggtaaacagcaagcgcctgactttaaccgaaaaaacggcgcaggaagccgtctccccggatgaagccgcgcgtattcaggctaatccgctggtgaagcaggaactggaaattaaccagcagttaagtcagcgtctgattaccgcgactgaaaacggtaatcagttgatgcagcaaaacattaaagtcaaaaactggctggagcgggcgctgcaatcggaacgcaatattaaagagcagattgccgtcctgaagggcagcctgctgttgtctcgtatcctttaccagcaacaacaaacgctgccctcggcggatgaactggaaaacatgaccaaccgcatcgcggatttgcgtctcgaacagtttgaagttaaccagcagcgtgatgcactcttccagagcgatgcgttcgtcaacaaactggaagaaggtcacaccaacgaagtcaacagcgaagttcacgatgcgttattgcaagtggttgatatgcgtcgcgaattgctggatcaactcaacaaacagttgggtaaccagctgatgatggccattaacctgcaaatcaaccagcagcagttaatgagtgtgtcgaaaaacctgaaatccatcctgactcagcaaatcttttgggtgaacagtaaccgtccaatggactgggactggatcaaagcgttcccgcaaagcctgaaagatgaatttaagtcgatgaaaattacggttaactgggaaaaagcctggcccgccgtttttatcgctttcctcgctggtttgccgctgctgttgattgccgggctgatccactggcgtctggggtggctgaaagcgtatcaacaaaaactggcttccgctgtgggttccctgcgtaacgacagccagctcaacacaccaaaagcgatccttatcgacctgatccgtgcactgccggtgtgcctgattattctcgcggttggcctgattctgttgaccatgcagctcaacatcagcgaactgctatggtcgttcagcaaaaaactggcgattttctggctggtgtttggcctgtgctggaaagtgctggagaagaacggcgttgccgtgcgtcacttcggcatgccggaacagcagaccagccactggcgtcggcaaattgtccgcatcagtctcgcgttgctgcctatccatttctggtctgtggtggcagaactttccccgctgcatctgatggatgatgtgctggggcaggcgatgattttcttcaacctgctgctgattgccttcctggtatggccaatgtgccgcgaaagctggcgtgataaagagtcgcacaccatgcgactggtcaccattaccgtgctgtcgattatcccgattgcattgatggtgctgactgccacgggttatttctacaccacgctgcgcctctccgggcgttggattgaaaccgtttatctggtgatcatctggaacttgctctaccagacggtattgcgcggcttaagcgtagcggcgcggcgtatcgcctggcgtcgtgcgctggcgcgtcggcagaatctggtgaaagagggcgcagaaggtgccgaaccgccggaagaacccaccattgcactggaacaggttaaccagcagacgctgcgtattaccatgttgctgatgtttgcgctgttcggtgtcatgttctgggcaatttggtccgatttgatcaccgtgttcagctatctcgacagcattacgctgtggcattacaacggtactgaagctggtgctgcggtggtgaaaaacgtcaccatgggtagtctgttgtttgcgattatcgcctcaatggtggcctgggcgttgattcgcaacctgcctggtttgctggaagtgctggtgctctcgcgactgaatatgcgccagggcgcgtcgtatgccattactaccatccttaactacatcattattgctgttggtgcgatgacggtgttcggatcgctgggcgtctcttgggataaactccagtggctggccgcagcattatccgtaggtcttggttttggtttacaagaaattttcggtaacttcgtctccggtttgatcattctgttcgaacgtccggtgcgtattggcgatacggtaaccattggtagcttctcggggacggtaagtaaaatccgtattcgtgcgacaacgattaccgatttcgatcgcaaagaagtgatcatcccgaacaaagcgtttgttaccgagcgtctgatcaactggtcgttgactgacactactacgcgtctggtgatccgtctcggcgtggcctatggctccgatctggaaaaagtgcgtaaagtgttactgaaggcggcgactgagcacccaagggtgatgcacgaaccaatgccggaagtcttctttacggcatttggtgccagcacgttggatcatgagctgcgtctgtatgtgcgtgaactgcgtgaccgtagtcgtactgtcgatgagctgaaccgtactatcgatcagctgtgccgtgaaaacgacatcaacattgcctttaaccagcttgaagtgcatctgcacaacgagaagggcgatgaggtgacggaagtaaaacgcgactacaaaggcgacgatccgacgccagcggtagggtaaggacaataaagggcgacagtgatgccgccctttattttttactcgctttgtgaagcctcatcgctctgtaacttcttttcataatcacgctttacaatatccagcgcgcgcagcacggtgcgggctgggatctgattttcttccagcagcacaatcaaatcgacagccagtttgacatcgtcaggggcattttccagtgacatactctctccattgctagcgggttaaacgcgctaacctgttttcgattttttccagcgcatggcggcagcgtgccaggcgcgcttcataggcttccacttcacgatgcagcgtttgctgttccacgagatcggtcacccgcgccaggcgggctctacgttcggcaaccatctcacgtagccgccgctcaaaatcctgatgctgaatacgtttacgctgccagcgggcaatttggggtggtgcgctatcccactcgcgtagcgaccaggctgtggcttcacgcgctatagcctccagttgcgccgccagatgttctgccagccaggcgacttgcggcagttgctgttgctcaactgcatgacgaagcgcagccagattatcgcccgcctcgtcgagacaagcctgtagtgttgtcgcacgagtctgaaaaagatgcctgttgaaacgagcacttagcgtggcgaactgtgacaccggggcacaacgctgacgcagcgtagcgagctgtcnttccagtttttccagcagcagggcggttttcacgataagacctcaatgaaaatgataattgttatgctaaagtagccactctgtaagctgacaacactcaatatgcaacgaatcattttaatcatcattggctggctggcggtagtgctgggcacgctgggcgtggtattaccggtattaccgacgacgccgtttatcctgctggcggcctggtgctttgcccgttcttccccgcgctttcacgcctggttgctgtaccgctcatggtttggcagctatctacgtttctggcagaaacatcatgcgatgccgcgcggcgtcaaaccgcgggcgattttgcttattttgctcacgtttgccatttctctgtggttcgtccagatgccatgggtgcgcatcatgttgctggtaattctcgcctgtttgcttttctatatgtggcgaattccggtgattgatgaaaagcaagaaaagcactgaagcacaacaatcgcagttgcaattattgcgtatagccagtacattctggcgttttcgagcacaggcgcaggcggtcaaaggttaaacaactgttacttttgatacgtttaaaacgcgccgtgagtaccaccgtaacaagcaggcatacacttatgaccgcgactgcacagcagcttgagtatctcaaaaatagcatcaaaagcattcaggactacccaaaacccggcattcttttccgcgatgtcaccagcttactggaagacccgaaagcttacgctctcagcatcgacttgctggttgagcgttacaaaaatgcgggcattaacaaagttgtcggcaccgaagcgcgtggcttcttgtttggcgctccggtagctctgggtctgggcgttggctttgtaccggtccgtaaaccgggcaaactgccgcgtgaaaccatcagtgaaacttacgatctggaatacggcaccgatcagctggagatccacgttgatgccatcaaaccgggcgacaaagttctggtggtggacgatctgctggcaaccggcggcactatcgaagcgaccgttaaactgatccgtcgtctgggtggtgaagtggctgacgctgcgttcattatcaacctgttcgatctcggcggcgaacagcgtctcgaaaaacagggcattaccagctacagccttgtcccgttcccgggccattaattatcgccagtcttgtgctgcccacgctacggacagcacaagatgtgcattcagcctcgccgttctgacggggctgtgttagcattaccccttcgtgaatccaccttccagcgtttcagagcctgccaatgagttatcaggtcttagcccgaaaatggcgcccacaaacctttgctgacgtcgtcggccaggaacatgtgctgaccgcactggcgaacggcttgtcgttagggcgtattcatcatgcttatcttttttccggcacccgtggcgtcggaaaaacctctatcgcccgactgctggcgaaggggctaaactgcgaaaccggcattaccgcgacgccgtgcggcgtgtgcgataactgtcgtgaaatcgagcaggggcgctttgtcgatctgattgaaatcgacgccgcctcgcgcaccaaagttgaagatacccgcgacctgctggataacgtccagtacgctccggcgcgtggtcgtttcaaagtttatctcatcgacgaagtgcatatgctgtcgcgccacagctttaacgcactgttaaaaacccttgaagagccgccggagcacgttaagtttctgctggcgacgaccgatccacagaaattgccggtgacgattttgtcgcgctgtttgcaatttcatctcaaggcgctggatgtcgagcaaattcgtcatcaacttgagcacatcctcaatgaagaacatatcgctcacgagccgcgngcgctgcaattgctggcgcgcgccgctgaaggcagcctgcgagatgccttaagtctgaccgaccaggcgattgccagcggtgacggccaggtttcaacccaggcggtcagtgcgatgctgggtacgcttgacgacgatcaggcgctgtcgctggttgaagcgatggtcgaggccaacggcgagcgcgtaatggcgctgattaatgaagccgctgcccgtggtatcgagtgggaagcgttgctggtggaaatgctcggcctgttgcatcgtattgcgatggtacaactttcgcctgctgcacttggcaacgacatggccgccatcgagctgcggatgcgtgaactggcgcgcaccataccgccgacggatattcagctttactatcagacgctgttgattggtcgcaaagaattaccgtatgcgccggaccgccgcatgggcgttgagatgacgctgctgcgcgcgctggcgttccatccgcgtatgccgctgcctgagccagaagtgccacgccagtcctttgcacccgtcgcgccaacggcagtaatgacgccaacccaggtgccgccgcaaccgcaatcagcgccgcagcaggcaccgactgtaccgctcccggaaaccaccagccaggtgctggcggcgcgccagcagttgcagcgcgtgcagggagcaaccaaagcaaaaaagagtgaaccggcagccgctacccgcgcgcggccggtgaataacgctgcgctggaaagactggcttcggtcaccgatcgcgttcaggcgcgtccggtgccatcggcgctggaaaaagcgccagctaaaaaagaagcgtatcgctggaaggcgaccactccagtgatgcagcaaaaagaagtggtcgccacaccgaaggcgctgaaaaaagcgctggaacatgaaaaaacgccggaactggcggcgaagctggcggcagaagccattgagcgcgacgcgtgggcggctcaggtgagtcaactttcgctaccaaaactggtcgaacaggtggcgttaaatgcctggaaagaggagagcgacaacgcagtatgtctgcatttgcgctcctctcagcggcatttgaacaaccgcggtgcacagcaaaaactggctgaagcgttgagcatgttaaaaggttcaacggttgaactgactatagttgaagatgataatcccgcggtgcgtacgccgctggagtggcgtcaggcgatatacgaagaaaaacttgcgcaggcgcgcgagtccattattgcggataataatattcagaccctgcgtcggttcttcgatgcggagctggatgaagacagtatccgccccatttgatcgtaagcacagcttacgttcgtcatccttaacgtgattgagagagaaacctatgtttggtaaaggcggtctgggtaacctgatgaagcaagcccagcagatgcaagaaaaaatgcagaaaatgcaggaagagatcgcgcagctggaagttaccggcgaatctggcgcaggtctggtaaaagtgaccatcaacggtgcacataactgccgtcgcgtagagatcgacccgagcctgctggaagacgacaaagagatgctggaagacctggtggctgcagcattcaacgacgcagcacgtcgtattgaagaaacgcagaaagaaaaaatggcttctgtatcctccggaatgcagctgccgcctggctttaagatgccgttctgatgcaaaccagcccgctgttaacacagcttatggaagcactgcgctgtctgccgggcgttggcccgaagtcggcgcagcgtatggcgttcacgctgcttcagcgcgatcgtagcggcgggatgcgtctggcgcaggcgctcacccgggcgatgtcggaaatcggccactgcgccgattgccgcaccttcaccgaacaggaagtctgtaacatctgttcgaatccgcgtcgtcaggaaaacggtcaaatctgcgtggtggagagtccggcggacatttacgccattgagcagacggggcagttttcaggtcgttattttgtgttgatgggacatctgtcaccgctggacggcatcggtccggatgatatcggccttgatcgtctggaacagcgtctggcagaggaaaaaatcactgaagtgatcctcgccaccaaccctacggttgaaggtgaagctaccgctaactacattgccgagctttgcgngcaatatgacgtggaagccagccgaatcgctcatggcgtaccggttggcggcgaactggaaatggtcgatggcaccacgctgtcacactcccttgccgggcgtcataagattcgtttttaagcaaacgagagcaggatcacctgctctcgcttgaaattattctcccttgtccccatctctccctcatcctgtttttaaccttaaaatggcattattgaggtagacctacatgaaaggacaagaaactcgtggttttcagtcagaagtgaaacagcttctgcacctgatgatccattctctctattccaataaagaaatcttcctgcgtgagcttatctctaacgcctccgatgcggcggacaagttgcgtttccgtgcgctctctaacccggacctgtacgaaggtgatggcgaactgcgcgttcgtgtctctttcgataaagacaagcgcacgctgaccatctccgataacggcgtggggatgacccgcgacgaagtgattgaccatctggggactatcgctaaatccggtaccaaatcattcctcgaatccctgggttctgaccaggcgaaagacagccagctgatcggtcagtttggtgttggtttctactctgcgtttatcgtggccgacaaagtgaccgtgcgtactcgcgcggcaggcgaaaaaccagaaaacggcgtcttctgggaatcggctggcgaaggtgaatataccgttgccgacatcaccaaagaagatcgtggtactgaaatcaccctgcatctgcgtgaaggcgaagacgagttcctcgatgactggcgcgtgcgttccatcatcagcaaatactccgaccatatcgcgctgccggtagagatcgaaaaacgcgaagagaaagacggcgaaaccgttatctcctgggagaaaattaacaaagcgcaggcgctgtggactcgtaacaagtcggaaatcaccgatgaagagtacaaagagttctacaaacacatcgcccannnnnttaacgatccgctgacctggagccacaaccgtgttgaaggtaagcaggagtacaccagcctgctgtacattccgtcccaggctccgtgggatatgtggaaccgcgatcataaacacggcctgaaactgtatgttcagcgtgtgttcatcatggacgacgcagaacagttcatgccgaactatctgcgcttcgtgcgtggtctgattgactccagcgatctgccgctgaacgtttcccgtgaaatcctccaggacagcacggtaacgcgtaacctgcgcaatgcgctgaccaagcgtgtgctgcaaatgctggaaaaactggcgaaagacgacgcggaaaaataccagaccttctggcaacagtttggcctggtactgaaagaaggtccggcggaagatttcgctaaccaggaagcgatcgccaaattgctgcgttttgcttctacccataccgattcttctgcgcagaccgtgtctctggaagactacgtttcccgcatgaaagaagggcaggagaaaatctactacatcactgcagacagctatgcggcagcgaagagcagcccgcacctggaactgctgcgtaagaaaggcatcgaagttctgctgctttccgaccgcatcgatgagtggatgatgaactatctgactgagttcgacggtaaaccgttccagtcggtgtctaaagttgacgagtcgctggaaaaactggctgacgaagttgatgagagcgcgaaagaagcggagaaagcactgactccgttcatcgaccgtgtgaaagccctgctcggcgagcgcgtgaaagatgtccgtctgactcaccgtctgaccgatacgccagcgatcgtttcgaccgacgcggacgaaatgagcactcagatggcgaaactgttcgctgcggcgggccagaaagtgccagaagtgaaatacatcttcgaactgaacccggatcacgtactggtgaaacgtgcggcagatactgaagatgaagcgaagttcagcgagtgggtagaactgctgctggatcaggcactgctggcagaacgcggcacgctggaagatccgaacctgtttattcgtcgtatgaaccagctgctggtttcctgatgtaatgccggatgaccttcgtgtcatccggcatttttcttttcattatctgcactttccgcaaattatctcgccattaaccgtttcagcccctggtgcctttcttgaggcaatcgcctgatggtggtatcgtttatcgctttttcaaaaaattcgacacattttaaggggattttcgcaatgcgtatcattctgcttggcgctccgggcgcggggaaagggactcaggctcagttcatcatggagaaatatggtattccgcaaatctccactggcgatatgctgcgtgttgcggtcaaatctggctccgagctgggtaaacaagcaaaagacattatggatgctggcaaactggtcaccgacgaactggtgatcgcgctggttaaagagcgcattgctcaggaagactgccgtaatggtttcctgttggacggcttcccgcgtaccattccgcaggcagacgcgatgaaagaagcgggcatcaatgttgattacgttctggaattcgacgtaccggacgaactgatcgttgaccgtatcgtcggtcgccgcgttcacgcgccgtctggtcgtgtttatcacgttaaattcaatccgccgaaagtagaaggtaaagacgacgttaccggtgaagaactgactacccgtaaagacgatcaggaagaaaccgtacgtaaacgtctggttgaataccatcagatgacagcaccgctgatcggctactactccaaagaagcggaagcgggtaacaccaaatacgcgaaagttgacggcaccaagccggttgctgaagttcgcgctgatctggaaaaaatcctcggctaatcaagccgcagcagatctgctttcgggcaggtctgctcatccacctcaggcaatacctctcacagcaattagttcttcttcctcacttttccgctacaattatcaacaagttgaatcgataagaggcggtaatgcgtcagactaaaaccggtatcctgctggcaaacctgggtacgcccgatgcccccacacctgaagcggtaaaacgctatctgaaacaatttttaagcgacagacgcgtggttgatacctcacggttgttatggtggccattgctgcgcggcgtgattttgccgctgcgctcgccgcgtgtggcgaagctgtatgcctctgtctggatggaaggtggctcgccgctgatggtttacagccgccagcaacagcaggcgctggcacaacgtttaccggagacgcccgtagcgctgggaatgagctacggctcgccatcactggaaagcgccgtagatgaactcctggcagagcatgtagatcatattgtggtgctgccgctttatccgcaattctcctgttctacggtcggtgcggtatgggatgaactggcacgcattctggcgcgcaaacgtagcattccggggatatcgtttatacgtgattacgccgataaccacgattacattaatgcactggcgaacagcgtacgcgcttcttttgccaaacatggcgaaccggatctgctgctgctctcttatcatggcattccccagcgttatgcagatgaaggcgatgattacccgcaacgttgccgcacaacgactcgtgaactggcttccgcattagggatggcaccggaaaaagtgatgatgacctttcagtcgcgctttggtcgggaaccctggctgatgccttataccgacgaaacgctgaaaatgctcggagaaaaaggcgtaggtcatattcaggtgatgtgcccgggctttgctgcggattgtctggagacgctggaagagattgccgagcaaaaccgtgaggtcttcctcggtgccggcgggaaaaaatatgaatatattccggcgcttaatgccacaccggaacatatcgaaatgatggctaatcttgttgccgcgtatcgctaaagctgagcggtaaagaactgagcgccgtcgcgaagagcctcgtcggcggttttcatcatccgtgaataatgcaaaaaggcgtgcagcgtgcctgggtagagtttgaactcacaggactgctgatgcgccgctaacgtctggtaaagcagacggctgtcatccagcagcggatcgaactccgccccggcaataaaacagggcggaacttcgcgagtgagatcattattaaacagacagtaatacggcgactcgcggtccgcgtcgttgcttaaatacgcctcttcatacatctgcaaatcctgttgcgttaagccatcccagacaccgcccaacagacgacgagtcacggaatcccgtaatccgtaaagcccataccacagcaaaacgcccgcaactttaccgcaatcgatctgtttatcacgcaaccacaacgcactggcgagcgccagcatggcacctgcggaatcaccggcaaagccaatgcgggacatattgatttgataatcctccgcctgctggtggaaataacaacaagcagccacaatttcctctatcgcttgcggaaaacgcgcttcaggtgaaagggtgtaatcaataccaatcaccgtacattggctgtagcttgccagcaggcgcatgatgcgatcgtgggtatcgagattgccgagaataaaaccgcctccatgcaaataaaatagcgttgccgggctatctggctgcggacaaaagagacgtgtttccacctgcccatattttgttggaaccatgtaagctttggttgccatttctggagcgcccgcattccagaatcggcgctcaagcgtgtaatactgtcgttgctcagcaatcgttcccgttgcgggccagggcggtaaatccggctgaagagtattcacaacggtcttcatttcagcagaaataaggtccagaacaggtaatttgttttccggcttcatacaaaaactcctttcaaattacgtcattgtaaggaaccactgccatgaaaatgcgatcccgcctgctgatattgaaactggctgcgtctcgcgcgctcccgtcagattgtgttaacattcgccgctcagttaaccacccgtaaaaacaaccatgaaatttcccggtaaacgtaaatccaaacattacttccccgtaaatgcacgcgatccgctgcttcagcaattccagccagaaaacgaaaccagcgccgcctgggtagtgggtatcgatcaaacgctggtcgatattgaagcgaaagtggatgatgaattcattgagcgttatggattaagcgccgggcattcactggtgattgaggatgatgtagccgaagcgctttatcaggaactaaaacagaaaaacctgattacccatcagtttgcgggtggcaccattggtaacaccatgcataactactcggtgctcgcggacgaccgttcggtgctgctgggcgtcatgtgcagcaatattgaaattggcagctatgcctatcgttacctgtgtaacacctccagccgtaccgatcttaactatctacaaggcgtggatggcccgattggtcgttgctttacgctgattggcgagtccggggaacgtacctttgctatcagccctggccacatgaaccagctgcgggctgaaagtattccggaagatgtgattgccggagcctcggctctggttctcacctcttatctggtgcgttgcaagccgggtgaacccatgccggaagcaaccatgaaagccattgagtacgcgaagaaatataacgtaccggtggtgctgacgctgggaactaagtttgtcattgccgagaatccacagtggtggcagcaattcctcaaagaccacgtctccatccttgcgatgaacgaagatgaagccgaagcgttgaccggagaaagcgatccgttgttggcatctgacaaggcgctggactgggtagatctggtgctgtgcaccgccgggccaatcggcttgtatatggcgggctttaccgaagacgaagcgaaacgtaaaacccagcatccgttgctgccgggcgctatagccgaattcaaccagtatgagtttagccgcgccatgcgccacaaggattgtcagaatccgctgcgtgtctattcgcacattgcgccgtacatgggcgggccggaaaaaatcatgaacaccaacggagcaggggatggcgcactggcagcgttgctgcatgacattaccgccaacagctaccatcgtagcaacgtaccaaactccagcaaacataaattcacctggttaacttattcatcgttagcgcaggtgtgtaaatatgctaaccgtgtgagctatcaggtactgaaccagcattcacctcgtttaacgcgcggcttgccggagcgtgaagacagcctggaagagtcttactgggatcgttaagttatcgtcggttcgtaggccagataaggcgttcacgccgcatctggcattttgctctcaatgcctgatgcgacgctggcgcgtcttatcatgcctacatatttttcatattttacatccggcaaccaccgtttaccccgtcaccacttcacccgccggtggcgtttccagcagttccagcatagtacgggcaatttcacgctcgcccatcactacttgattcgcaccacgttcggtgatatacgccacttcatcgtcataatgggcgcgggcaataatctcaatatccggatttttcgcgcgggcagatgncacaatctcacccgcttcataaccgttggggatcgtcaggatcagccattttgcacattccagatgcgccagttgcataatttcttcgttcgccgcattgcccaatactgcgcggaccccgcgctctcgcagctcatcaacacgggttcgtgacgtctcaatcaccaccagcggaatatcagaggcgagcaatttctcccccagcaggctgcctacacgaccgtaacccaccaatagcgcatggttgcaaatatccactgggatctgcttctcttcttcgattgcctcttccagcgtctgctcttccagcgtttcggtcttcgccagatatttctccagtagtgcgaacagtactgggttgagcataatcgacaggatcgcccctgccagtaccaggttttgtccggcctgcggcagtaaattcaatgccattcccagtcccgccaggataaacgcgaactcaccaatctgcgccaggctggcggcgatagttaatgccgtacgttgggagtgaccaaacagtcgcaccaggaaaaacgcggctaacgacttaccaaacagaataatcgccagcgtcgccagcactgccagcggttgctgaatcagaattaacggatcaaacaacatcccgacggagacaaaaaacagcaccgcaaacgcgtcgcgcaatggcagcgtatcgtgggcggcacggtgactcagttcagactcgttcagtaccatcccggcaaagaacgcaccgagtgcaaaggagacatcaaacagctctaccgcaccaaaggcaatccctaacgccagcgccagcaccgacagggtaaacagctcgcgagaaccggttgccgcgctgcgtgccataatccacggcaccagacggcgacctaccagcatcataatggcgataaacgcgatcactttgccgatggtgatccccatatcgactgcaagagtggcaaagcccacatcgccctgttccatcattcctgccactgcgggcagcaacaccagcgtcagaaccattaccaggtcttccacaatcaaccaaccgatggcgatttgcccacgctgactgtcaattaattgccgttcttcaagtgcgcgcagtaacaccacggtactggcggtggaaagacataaaccgaacacgataccggtcattaacgaccagcccagcacggcagagagcgccatacccagcagcgtcgccacggctatctgggcgatcgcaccgggaatggcgatggcctttaccgccatcaaatccttgagcgaaaagtgcagacccacgccaaacatcaacagaatgacgcccagttcagccagttccggcgcaagcttggtatcggcaacaaagcccggagtgaatggtcctgccagcacacccgctaacagatatcccaccagaggagaaatacgtagtttattggccagcatgccgaggataaaggcgagcacaaggccgccaacaatggtggtgataagcggggtggcgtgatgcattccgtctccttttcctggtggttattgtccatttttggccgggaaaaccaaaattacaggtnatagtttatgacaatttcattgatgatgttcatgaataattattgaattttgcagaaaaatggaattagctgcaaaaaagcacggatcggaaaacagaaggcggtttaacagaggaaaggcttatggcgactgtaaaacgatgcagccaaagtttgcctttggctgcaatgaaatcagtctttatgccggttatcaggcaggaatatggtcaacatccccaatagtggcaggaaagcacatattttatagactaactcgatgctggtgtgatcggcgataagccccagaactgccgctcccagacctcccatgccgaaagcaaaaccgaaaaagagtccagaaaccataccgatacgtcctggaagcagctcctgagcgtagaccagaatggcagagaatgccgaagcgaggataaatccaataatcaccgttaaaacccccgtccagtgcaggctggcgtagggtaaaatcagcgtaaacggcgcaacgccgaggatagagccccaaatcacatatttccgcccaattttatcccctacaggcccgccgatcaccgtacctgccgcaacggcaaacaggaaggcaaacagatgaagctgagcattctggatagataatccgaatttttgcatcagataaaaggtgtaatagctgctgatgctcgccatatagaaatatttcgagaaaatgaggattaacagaatgctgaccgccagtaccactttgttgcgcggcagtggattgataatcgtcgctttgggttttcctttattcattcggtgctgtgccgagtaccaacggctgatttgcgccaacaccacgatcgccagcagtgccgcaagcacaaaccaggcaacgttgcctttgccataaggcgcgataatcaccgccgccagcaagggtcccagggaactgccaaagttgccgccgacctgaaagatagattgtgccaggccatgccgcccgccggaagccatacgggccacgcgagaagattccggatgaaagaccgatgaaccggtaccgaccagcgccgccgccagcagaactgcgccaaaactgcccgccagcgcaagcagcaccagaccacttaaggtaaagcacatgccaattggcaacgaccacggcatcggatatttatcggtccagtagccgaccactggttgcagtagcgaagaggcgagctggaaggtgagggttatcatgccaatctgcataaatgtcagagaaaattctgactgaagcagaggataaatcgccagaatcagcgattggatcatgtcgttcagcagatgtgagaggctgatagcacctaaaataccaaacgatgttcgggccttggtcgttgacgcagccncgcccgccacaggctgggtttgttcactcattgccataggaaagtcactttttcagggttgcgatgttaagaatgatcttatttgtgattattacccgactaacatacctgtatgcgccgcctgaaggaagtctcaacgctgaatacagaatttctaatctggatgcagatttatcttcaccggacgcagacttgtctatgatgtcgcgtcatactatttttcaacacgttgaaatcaggtcagggagagaagtatgaaattattgcagcggggcgtggcgttagcactgttaaccacatttacactggcgagtgaagctgctctggcgtatgagcaggataaaacctacaaaattacagttctgcataccaatgatcatcatgggcatttttggcgcaatgaatatggcgaatatggtctggcggcgcaaaaaacgctggtggatggtatccgcaaagaggttgcggctgaaggcggtagcgtgctgctactttccggtggcgacattaacactggcgtgcccgagtctgacttacaggatgccgaacctgattttcgcggtatgaatctggtgggctatgacgcgatggcgatcggtaatcatgaatttgataacccgctcaccgtattacgccagcaggaaaagtgggcaaagttcccgttactttctgccaatatctaccagaaaagtaccggcgagcgcctgtttaaaccatgggcgctgtttaagcgtcaggatctgaaaattgccgttattggtctgacgacggatgacacagcgaagttaggcaatccagaaaacttcaccgatattgagttccgtaagcccgccgatgaagcgaagctggtgattcaggagctgcaacagacagaaaagccagacattattatcgcggcgacacatatggggcattacgataacggcgatcacggttctaacgcaccgggcgatgtggagatggcacgcgcgttgcctgccggatcgctggcgatgattgtcggcggtcactcgcaagatccagtctgtatggcagcggaaaataaaaagcaggtagattacgttccaggtacgccatgcaaaccggatcaacaaaacggcatctggattgtacaggcgcatgagtggggcaagtacgttggtcgggccgactttgagtttcgcaacggcgaaatgaaaatggttaactaccagctgattccggtgaacctgaagaagaaagtgacctgggaagacgggaaaagcgagcgcgtgctgtacacccctgaaatcgctgaaaaccagcaaatgatctcgctgttatcgccgttccagaacaaaggcaaagcgcagctggaagtgaaaataggcgaaaccaatggtcgtctggaaggcgatcgtgacaaagtgcgttttgtacagaccaatatggggcggttgattctggcagcacaaatggatcgcactggtgccgactttgcggtgatgagcggaggcggaattcgtgattctatcgaagcaggcgatatcagctataaaaacgtgctgaaagtgcagccattcggcaatgtggtggtgtatgccgacatgaccggtaaagaggtgattgattacctgaccgccgtcgcgcagatgaagccagattcaggtgcctacccgcaatttgccaacgttagctttgtggcgaaagacggcaaactgaacgaccttaaaatcaaaggcgaaccggtcgatccagcgaaaacttaccgtatggcgacattaaacttcaatgccaccggcggtgatggatatccgcgccttgataacaaaccgggctatgtgaataccggctttattgatgccgaagtgctgaaagcgtatatccagaaaagctcgccgctggatgtgagtgtttatgaaccgaaaggtgaggtgagctggcagtaatccgaaagtgccggatgttcgcatccggcacaatgcttaatcgcggcgggcgatatcagcaaatttggcatcgaggatcttcgccagatcgcctgccgccagttcgatatccagtccgcgcttgccgccggaaacataaatagtggcaaattcttgtgcgggggcgtcgataatcgttggcagacgttttttctgccccagtgggctaatccccccaaccaggtatcccgtcgaacgctgcgcgaccatcggatcggccatctcaactttcttggcacccagcgcttttgctacttttttaaggtccagttgacctgcgaccggcgtaacggccacggcaaggtgtttcatatcaccgttcactgcgaccagcagcgttttgtagacctgatccggattcaaacctaattttttgacgacttcatcgccaaaattggtttcagccggatcgtgctcgtaggtatggatttgaaacgaaatcttgtttttttcgagtantttaactgcgggtgtcatggtaattttcctgccttaaacaaaaaaacgaagcaagcatacgcctgatggcggtccaaaaaaaagagtcatcttgcctaagagtattggcaggatggtgagattgagcgacaatcgagttacaccgtcgcttaaagtgacggcataataataaaaaaatgaaattcctctttgacgggccaatagcgatattggccatttttttagcgcaacatttgcggtaaattcccttctccatacaggtgtagtgcaccgaccgcgaccacatatcgccccggcggcatggcgcgtaatttatcccgccaggcgagatttcgctgatgcatcagcacatcgtacagcgactgactgaacgtattgggcagcgttatttcattattttgcggcggcgcattcagccaccagctcatcatttgttgcagcaaccgtgcgttggtatgccagtgggtcagcgtatcgtccagcagcgccagtcctttgtcagggagctggagcaacatggcaatctggttttccgccccttccagttcaatcacgggtttatgttgttgcttcgccgcctgcaatagctgataatcgataccgtattctgcccgcagccccagtttttgtgcctgcgtcgcctgaagaaccatcgcgatttgccacagcggttgggtagaaaagagtgagggagaaatgcccatctcctggctaatgtgctgcagtttttggagttgctcctcgctaatgcgctcttccagcgcctcgcaggcaggcaaattagcaaaaggcgtatcgctggtggaaacatccgcctcgacgatcagcgcatcggcgtttttgagctttttgagcaaacgggtgggtaggggagccatatcgtggctacccatatgaatactgccaatcagatgaaaatggcgattgccgggaagagagatatcaatggcaggccaggtgtaatgattaccgcgcagcgcggcccaaagcgtttttacccggtacaacagatccatacgacctccctttgtgaaatatcatgctagcgcgcggggagggatggcgcaaatggagttggggacttgtttaatgtgtttgtatgattcagtatgttcttgtatcgctatttacagggaagcaacagttaaaaactatgaaacaggcaacaagaaaaccgacgacacccggagatattcttctctatgaatatctggaaccgctagatttgaaaatcaatgagttagcagagttgctgcatgttcatcgtaatagcgtcagtgcactgatcaataacaatcgtaaactcaccactgagatggcattccgtctggcgaaagtttttgataccacagtcgatttttggctaaacctccaggcggcagttgatctttgggaagttgaaaacaacatgcgcacccaggaagaattgggacggattgaaacagtggctgaatatttggcacgccgtgaagagcgtgcaaaaaaggtcgcgtaaggccaaaacatcgcttcatctcgtaggccggataaggcgttcacgccgcatccggcatccgagcaccattgcctgatgcgacgcttacgcgtcttatcaggcctacaaacctgtgcctgaaccgtaggccggataaggcgtttacgccgcatccggcagtcatgcgtcgatgccaaatgcgccaccctaaagcagcgcatccgcaatgacgtacttattccttcggtttaaannnnnnnaaccggttggcgttactcactacggtaatcgacgagagcgccattgccgctccggcaactaccgggttaagcagtgttccagtaaacggccacaaaataccggcggcgaccggaataccgatactgttgtagataaacgcgccgagcaggttctgcttcatgttgcgcagcgttgcgcgggaaatagcgagcgcatccgcaacgcccatcaggctatggcgcatcagggtaatcgccgcggtttcaatggcaacatcactgccgccgcccattgcaatgccgacatccgcctgggccagcgctggcgcatcgttaatgccgtcgcccaccattgccacctgacgtccttcactttgcaggcgtttaatcgcttcggctttaccgtccggcagcaccccggcgatcacctcatcaatccctgcttctttggcgatcgcattggcggtggttgggttatccccggtcaacatcaccagacgatatcccgctttatgcagacgttgcagcgccgccacgctatcactacgcaacggatcgcgtacagccagcagggctaccgctttcccgtcaaccgccagcagcacaggcgttgccccttgcgatgcctgagctgaaatatctgcttcaatcgctttagtatcaacttgctggtcatttaacagcgcctgattgcccagcaataacgcatgaccttcagcttcaccgctcacgcccagcccgcgcaatgtgcggaaaccgttgacctgcggcagctgcatatcgcttgctttatcgaggatcgcccgcgccagcggatggctggaaccttgttccagtgccgccgccagacgcagcgcctgcgcttcgtcaaaatcagcaaatgttttcactgcgacaacctgcggcttcccttcggtcagcgtcccggttttatcgaacactacggtatcgagtgtactggcgcgttgcagcgcgtcggcgtcccgcaccagcacgccaaactcagccgcccgcccgacgccggaaataatcgacatcggcgtcgccagccccagcgcacacggacaggcaataatcagcaccgtggtggcaatcaccagggtatagacaatctgcggtgccggaccaaagaaataccagattgccgcactgacaagcgcaataaccactactaccggcacaaatacggctgagattttatccgccagctgaccgatttctggcttgctgctctgggcctggcgcaccatacgaataatccttgatagcgtggtatggctgccaaccgcactggcgcgaaacagaacgctaccgtcctgtaccactgtcccggcatggacgctatcgccttcgcctttttgctgcgggataggttcgcccgtcagcatcgcttcatccagccatgcttcgccctgggtaatctcgccatctactggcacgcggtcgcccgtcgtcaggcgcagtagcatgcctggctgaacttccgccagcggcacgcttttttcaccttcgtcagtaaccaggcgcgccgtcggcggagttaaatcgagtaatttctccagcgcctttgaagaacgctgacgtgcgcgcgcttccagcatatgaccgagattaatcagaccgataatcatcgcactggcttcatagtaaagatgccgcgcttccatcgggaaccactgcggccacaggttgacgctcatcgaatagagccacgccacacccgtacccagcgccaccagcgtatccatcgtcgccgcaccgttcagcaggcttttccatgcactgcggtaaaaatggcngccggcgaaaaccatcactgccagggttatcaggccgataaccaaccacaggctgcggttgtcagcggtgaccatcatgttatcgccgatcatcccccagaccattaccgggatacccacagccagtgcaacaattgcctgccagcggaagcgcttcatcgtagcgacggcggtttcttgctggcgctcgcggcgtttcgcgtcatcttcaatcgcttccgcgccgtagcccgctttttccaccgcctgcactaaatcttgtggggaggcactgcccatcaccagcgcagtacgctccgccaggtttacccgtgcctgagtgacgcccggtacgctttgcagcgcattttgtacgcgggtgacacagctggcgcagctcatgccgctcagcagcaactgctggctgtcatcgtcatcggcggtcgctgccggaagcgcctcagaaaccgctgtcagtgcttccgacgggattgatgactccgccagcggtttagcctttgggtggcttacagatgcgtcataacccgcttgtttgatggtttcgatcagctgttctgcactggcagtcccggtaacgtgcgcttcagtgatagacacatccgcttgttccacatccgggcgctgttcgagactttctttcacgcgtttaacgcagtgaccgcaggacaggccgtccagggtcaggtcgatagtttgtgacataaaacactcctttaagacagttttgactggctgtgataaaggttaaaccttccagcaaggggaaggtcaagaaattaataacccaggcgagtaaaagtccgtaaagattaaaaaatcggctcgatttgcatcaggattagacatttatctctttgttttcctgtagttaagttgcgggtgctaagttaaatcaggatgcctgaaaatcggcaccggggtgaggaattacctcccgcatctataaaaaggagttaacaaaagatgttagatgcaaacaaattacagcaggcagtggatcaggcttacacccaatttcactcacttaacggcggacaaaatgccgattacattccctttctggcgaatgtgcctggtcaactggcagcagtggctatcgtgaccagcgatggcaacgtctatagtgcgggtgacagtgattaccgctttgcgctggaatccatctcgaaagtctgtacgttagcccttgcgttagaagatgtcggcccgcaggcggtacaggacaaaattggcgctgacccgaccggattgccctttaactcagttatcgccttagagttgcatggcggcaaaccgctgtcgccactggtaaatgctggcgctattgccaccaccagcctgattaacgctgaaaatgccgaacaacgctggcagcgaattttacatatccaacagcaactggctggtgagctggtagcgctctctgacgaagtcaaccagtcggaacaaacaaccaacttccataaccgggccattgcctggctgctgtactccgccggatatctctattgtgatgcaatggaagcctgtgacgtgtacacccgtcagtgctccacgctcatcaatactgttgaactggcaacgcttggcgcgacgctggcggcgggtggtgtgaatccgttgacgcataaacgcgttcttcaggccgacaacgtgccgtacattctggccgaaatgatgatggaagggctgtatggtcgctccggtgactgggcgtatcgtgttggtttaccgggcaaaagcggtgtaggtggcggtattctggcggtcgtccctggagtgatgggaattgccgcgttctcaccaccgctggacgaagaaggcaacagtgttcgcggtcaaaaaatggtggcatcggtcgctaagcaactcggctataacgtgtttaagggctgatcatgatgaacacggaaggtaataacggtaacaaacctctcggtctatggaacgtcgtttccatcggcattggggcaatggtgggggcggggatcttcgcgctgctggggcaggctgcgttgctaatggaagcctcgacctgggtcgcctttgcttttggcggtattgtggcgatgttttccggttatgcctatgcgcgtctgggggcgagctatcccagcaatggcggcattatcgacttctttcgtcgcggattaggcaacggcgtcttttcgctggcgctctcgttactgtacctgttgacgctggcggtgagcatcgccatggtcgcccgtgcttttggcgcttatgccgtgcagtttttgcatgaaggcagccaggaggagcaccttattttgctctacgcgttggggatcattgcggtgatgacgcttttcaactccttaagcaaccatgcggtagggcggctggaggtgatcctcgtcggcattaaaatgatgatcctgttattgctgattattgccggtgtctggtcgctgcaaccggcgcatatttccgtctctgcgccccccagctccggtgcgttcttctcctgtatcgggataaccttccttgcctatgcgggctttggcatgatggcgaacgcggcggataaagtgaaagatccgcaggtcattatgccacgggcgtttctggtggcaattggcgttaccacgttgctttatatctcgctggcgctggttttgcttagcgatgtatcggcattagagttagaaaaatatgccgataccgccgtagcgcaggctgcttctccgctgctcgggcatgtgggttatgtgatcgtcgtcatcggcgctttactggcgacggcttcagccatcaacgcgaacctgttcgccgtgtttaacatcatggacaacatgggcagcgaacgcgaactgccgaagctaatgaataaatccctgtggcggcagagtacctggggcaacatcattgtcgtggtgttgattatgctgatgacggcggcactaaatttaggctcactcgccagcgttgccagcgccacctttttgatttgctatctggcggtgtttgtggtggcgatccgcctgcgtcatgatattcacgcctcgttgccgattcttatcgtaggtacgttggtgatgttgttggtgatcgttggctttatctacagcctgtggtcccagggcagccgtgcgttgatatggattattggtgcaatcttactcagccttattgtggcaatggtcatgaagcgcaataaaaccgtataacacctctctgcgcgcagtactgcctgtactgcgcctttgtctttaattcaaattacctttcttattcctttaataaataagtcacaaaaaaatgatatatacgcgataaatctgtgatgctaatcacttattaccgtggattattcttaatgtgtatgatggtaatctaaaagtcgtagtgtattctaaataaataacgtataagctttttagctgcatttctttgcccatatcaatgatcgacaaaagagatgcacaagttattacccttcttaataaaacgagactggttataaaaaccagttaaaataatgacctggaaggaagtgacttatctatggcgcgattccagtttaaaaaccgtaaaaataatggacttatttttnttataagttttatggtgatgggagaagctgcaattgctgcaccgctgccacaatgggcgaatgccccagcggtaacgccagttgcccaattatctttacaggaaagtatattacgcgcctttgcgcgaaatcccggtgtcactcaacaggcggcgcagataggtattggcgaagcgcaaattgatgaagccaaaagtgcctggtatccgcacgttggattaaccggcaacgcggggccgtcccgacaaacggactccagcggcaggcttgataacaacgtttcgtatggcataaccctgacacaactggtgtatgactttggtaaaactaacaacgatatcaatctgcaaactgccgcccgtgacagctaccgctttaaattgatggcaaccttaaccgatgttgcagagaaaacggcgactgcctacatggaagtcagtcgttatcaggctttgtgcgatgcggctcaacgcaatattcactcgctggaaaacgtctacaacatggcggcattgcgcgctaacgcaggcctgaactcatcgtcggatgaattacaggcccagacgcgtattgccggaatgcgctcaacgctggagcaatatcaggcgcagatggcgagcgccaaagcgcaactggcggtgctcactggcgtacagccggaggcgatagccgcgccacctgctgaattagccgagcagccggtatcgctgaagaatattgattaccagtccatcccgctggtgctggcggcagaaaacttacgccagtcagcacagtacggcgtggaaaaagcgaaagcgcaatactggccaacgctcagtattcaggggggtaaaacgcgctaccagaccagcgaccgctcgtattgggatgatcagctacaactgaacgttaacgcgccgctgtatcagggcggcgcggtttctgcccaggtgcaacaggccgaagggcaacaaaaaatctctgcctcgcaggtcgaacaggcaaaactggatgtgctgcaacgagcgtctgtggcatatgcgaactggaccggagcacggggtcgtgaagaagccggtttagcgcaatccgaaagtgcgcacaaaacgcgagatgtgtaccaaaatgaatataaattgggtaaacgcagtctgaatgatctattaaccgtcgagcaagatgtctttcaggcgcaatcggctgaaataaatgccaattatgatggctgggtcgccgccgtaaattatgccgctgcggtgaataaccttattccattagcgggaattaaacagggcttatacaacgacttacccgacttgaaataatcctgccattattaatagtgggccgttgttaagtgattacctttgtcttatttagataaatggactcgctaaggatgtgcgccatttatcaggaatgccattatgagcctgattattgatgttatttcgcgtaaaacatccgtcaaacaaacgctgattaatcctggcgacgtcacggttgttatttatgagccttccgtggtgcaggttcatgctcaggcctctgccgttgcgcgttacgtccgtgaaggaaatgacctgctgatctatatgcaggacggcacggtgatccgctgcaacggttatttcctgcaagcggcgaatacagctgaacaatcggaactggtgtttgccgatggtcaacagctaacccatatcacctttgccgatactgctgcgggtggattagcccccgtagaactgactgcccagaccactgcgattgaaagcattgcgccatttcttgataccgttgctcagaccagcgccttcccgtggggttggctggcgggggcggcggtaggtggtggcgcgcttggtgcactgctggcaagcggtggcgatggcgactcgaaaacagaagtgattaataaccctacgccacctgctgagcctggcaacgccacaccatcatttttagttaccgataatcagggcgatcagcgcggcattctagccaccaatgacatcaccgatgacaccacgccaacctttagcggcagcgggcaggcgggggcgactattcagattaaagacagtaacggcaatactattgccagtactcaggtagacaacaacggtcactggagtgtctcgttacccacgcaaagtgcaggtgaacatacctggtcagtggtgcaaattgtcggcagtaccatcactgacgccggttcgataacgttaaccatcgacaatagtcaggccagcgtgcaggttgccaccaccgcaggcgataacattattaacgccagcgaacaggccgccgggtttacgctttctggcaccagtagccatctggcgcagggaacagaactcaccgttacgctaaacggcaaaacctacacgaccagcgtaggcgctaacggtgcctggagcgtgcaggtgccgaccgccgatgcacaggcgttaggcgaagggaatcaggcggtgctggtcagtgggaaagacgccacaggcaatacggtcaccggcgcgcagctactaacggtcgatacccaaccgccaacgcttgccatcaacaccatcgctcaggacaacattatcagtgctgcggaacataacgtcgcgctggtactgagcggcacgtcgaatgcagaagcggggcaaaccgtaacactgaccgtcaacgggaaaagccatacagcaaccgtcggtagcgacggaacctggcaagtgacgctgcctgccacggaagtccaggcactggcggagggtaattacgctgtcaatgccagtgtcagcgatcgggcagggaacaccaccagccacagcgcgaatttcacggtagacacctcagcacccgtggtcagtgttaataccgtggcgggcgacgatattcttaataatgccgagcaggccgtcgcgcagatcatctccggacaagtcagcggtgcttctccaggcgatacggtaacggtgaaattgggcactcatgtcctgacgggcatcgtgctggcagatggcagctggaatgtggcgctggacccagcggtaacccgcacgctggatcgcggagccaatacgattttcgtcaccgtgacagatgctgcaggaaatactggcgcggcgtctcgagcaatcacgctggtcggtgtttctccgttgatcaccattaacaccgtctccggcgatgacattatcagtggcgcagaaaaaggtgcgccactgacccttaccggtagcactcaacaggntgagacaggacaaaccgtcacagtaaccctggctggacagagttttaccactaccgtgcaggccgatggctcctggagtctgacggtacctgccgccgcgatgggaaatctgcctgacggcgcggtggcgattaccgcttctgtgacggatctcagcggcaataccggcaacacttcccgcaccattaccgtcgatagccaggccccggccttaagcattgatccactgaccgctgataacatcattaacgnnnnnnnnnnnnnncaggatctgcccatcaccggcaccaccgacgctcagccggggcagacggtgaccgttacgttaaatgggcagacgtatcagggcgtcgtgcagccagacggcacctggagcgtgactgtgcccgccgccaacgtgggcgcactggctgacggcaacgctacggtcaccgccagcgtgaacgatgtcgccggtaatccgagcagcgtttcacgcgtggcgctggtggatgccacgccgccggtggtaaccattaatccggtggcgaccgataacgtcatcaacacgccggaacatgctcaggcgcaaatcatcagcggcacggttactggcgctcaggcgggcgatatcgtcaccgtgacgctgaataatgtggattacaccacggtggtggatggttccggcaactggagtctgggcgttccggcctcggtggtcagtgggctggcggacggcagttatcctgtcagcgtctcggtaaccgacaaagccggaaacacgggcagccagtcattgaccgtcacggtcaataccgccgcgccccttatcggcattaacagcattgcgggcgatgatgtgattaacgccagcgaaaaaggggccgatctccagattaccggcaccagcgatcagcctgttaacaccgccatcaccgtgacgctgaacgggcaaaattacaccaccacgaccgacgcctccggcaactggagcgtcaccgttccggcatcggcggttacagcattaggccaggccaactatacggtaacggcggcggtgaccagcgatatcggcaacagcgccaccgccagccataacgtgctggtcgacagcgcgctgcccggtgtgaccattaatccggtggcaaccgacgatattattaacgccgccgaagcgggcgtggcgcaaaccatcagcgggcaggtgactggcgcggaagatggcgacacggtaactattacgttgggtggtaatacttatacggcgacggtgggcagcaatctcacctggagcgtggacgttccagcggcagatattcaggcgctgggaaatggcgatttaacggttaatgcctcagtcaccaatcaaaacggcaacaccggcagcggcacgcgggatatcaccatcgacgccaatctgcccggcctgcgggtcgatacggtggcgggcgatgatgtggtcaatatcatcgagcacgggcaggcgctggtggtcaccggcagcagctcggggctggctgaaagcacgccgcttaccgttacgattaataatgtggaatacaccactgcggtgcaggccgatggtagctggagcgtgggcgtcacggcggcgcaggttagcgcctggcctgcggggacggttaatattgccgtttcaggggaaagtagcgccggaaactcggtgagcattacgcatccggtgacggtggatctcactccggcagcgatcaccatcaacaccatcgccacggacgatgtgattaacgccgcagaaaaaggcgctgatttaaccctttccggcaccaccactaacgtagaactcggtcaaaccgtcaccgtcacctttggcgggaaaaattacactgccagcgtagcgagcgatggtagctggactgccaccgtacccgccgccgatctggcgtcattacccgagggcagcgcctccgcactggccagcgtcagcaatatcaacggcaatagcgcctcggcggtgcacaactacagcgtcgacagcagcgcgccaaccatcattatcaataccgtcgccagcgacaatatcgtcaacgccagcgaagccgatgcgggcgtgacggtgagcggcagtaccaccgccgaagcggggcagattgttacgataacgcttaacagcccgaccgtgcagacctatcaggcaacggtgcaggcggacggcagctggagcatcaatattccggcggcagatcttgaggcattgaccgatggcagccacaccctgaccgccacggtcaatgacaaagcgggcaatccggcgagcaccacgcataatctggcggtggatctcaccgttccggtgctgaccatcaacaccattgcgggcgatgacattattaacgccaccgaacacgggcaggcgctggtgatttccggttccagcaccggcggagaagcgggggatgtcgtcaccgtcacgctaaacagtaaaacctacaccaccaccctggacgcctccggcaactggagcgtcggcgttccggcggcggatgtcacggcgcttggcagcggcccgcaaactgtcaccgccacggttaccgatgcggcaggcaacagcgacaatgagacacacacggtcaccgttaacctcaccgcaccaaccattgacatcaacaccatcgccaccgatgacataattaacgccagcgaaaaaggcgcggatctgcaaatttccggcaccagtaatcagccagcaggcaccacgattacgctggcgcttaacgggcaaaattacaccgcgacgacggacgctgcaggcaactggagcaccacggtgccagcttccgcagtaggtgcgctgggcgaagccagctacacggtgacggcgaacgtcaccgacagcgcaggcaacagcaattccgccagccataacgtgcaggtcaataccgcgctgcctggcgtcaccattaacccagttgcgaccgacgatattattaacgccgccgaatcgggcaatgcgcaaaccatcagcggccaggtgacgggtgcggcggcgggcgatacggttaccgtaacgcttggcgggaaaacttacaccgctaccgtgcaggggaatttaagctggagcgtggacgttccggcggcggatattcaggccatcggcaatggcaatctgacggttaacgcttcggtgaccaacggcgttggcaatactggcagcggttcgcgagatattactatcgacgccaacctgccaggtctgcgcgttgacaccgtggcgggcgatgatgtggtcaatagcatcgagcacgctcaggcgctggtgataactggtagcagcagcgggctggcggcgggcgcggcgctgacggtggtgattaacacggtcacttacgctgcaacagtattagccgatggcacatggagcgttggtgttccggcggcagacgtgagtaactggcctgcgggtacggtgaatatcacggtaagtggcactaacacagccggaacaacatccaccatcacccatccggtcaccgtcgatctggcggcggtggcgatttccattaacaccgtttccggcgacgatgtgattaacgccgccgaaaaaggggcagatttaaccctttccggcagcacctccggcgtggaagtggggcaaacggtcaccgttacctttggcgggaaaacctacaccgctaccgtagcgggcgatggtagctggacaaccaccgtacccgccgccgatctcagcgtgttacgcgacggcgacgccaccgtgcaggccagcgtcagcactattaacggcaacacggcttcggcaacccacgcctacagcgtcgatgccacggccccgacgcttgccattaacaccatcgccaccgacgatattctgaacgctgccgaggcgggcaatccgttaaccatcagcggtagcagcaccgccnnnnnggggcagacggtaaccgtcacgcttaatggtgtgacttacagcggctccgtccaggcggacggcagctggagcgtcagcttaccgacggcggatctcagcaatctgaccgccagccagtacaccgttagtgcctcggtaagcgataaagcgggtaacccggcgtccgctaaccacgggctggcggtggatctcaccgtgccggtgctgaccatcaacaccgtctccggcgatgacattattaacgccgccgaacacggacaggcgctggtgatctccggctccagcactggcggcgaagcgggtgatgtcatcaccgtcacactaaacagtaaaacctacaccaccatgctggacgcttccggcaactggagcgnnnnnnnnnnggcggctgacgtcactgcgcttggcagcggcccgcaaactatcactgcggcaattaccgacgcggcaggcaacagcgatgacgccagccgcacggtcaccgtgaatctcgccgcgccaaccattggtatcaacaccatcgccaccgatgacgtgattaaagccacggaaaaaggcgcggacctgcaaatcaccggcaccagtaatcagcctgcgggcaccaccattacggtgacgctgaacgggcaaaattacaccgctactaccgatagcaacggcaantggagcgccacggtgccagcgtcagcggttagcgcattgggtgaagccaactacacggtaacggcaaacgtcactgatacggcaggcaacagtaattccgccagtcataatgtgctggtcaacagcgccttgcctgccgttaccattaacgcggtggcgactgacgatattattaacgctgccgaatcgggaaatgcgcaaaccatcagcgggcaggtgacgggcgcagcgcagggggatacggttaccgttacgctgggcggcaacacctacaccgccacggtgcagtctaatttaagctggagtgtggacgttccgnnnncggatattcaggcgctgggcaacggcgacctgacggttaatgcctcagtcaccaatggcgtcggcaacaccggcagcggctcgcgcgatatcacgatcgacgccaatctgcctggcctgcgggtcgataccgtggcgggcgatgatgttattaacagcattgagcacaatcaggcgctggtgatcaccggcagcagcagcggattaacggcgggaacggcgttaacggtcgagattaacaacgttacttatggcgcgacggtattagccgacggcacgtggagcctcggtgttccggcggtagacgtcagcaactggccagcgggtacggtgaatatcacggtaagcggcaccaacagtgccggaacaacctccaccattacccatccggttaccgtcgatctggctggggtcgccatcaccattaacactctctctggtgatgatgtgatcaacgccgtcgaaaaaggcgaaacgctggtcgtaagcggcagcaccagcggtgtcgaagccgggcagacggtgaccgtcacctttggcggcaaaaattacaccaccacagtggaagctaacggtagctggacggtgaatgtgccgcctgccgatctcgctgcgctaccggacggcgcgggcaacgtgcaggcgagtgtcagtaatattaacggcaacagcgcccaggccgatcgcgcgtatagcgttgatgccaccgcgccgcttgtgaccatcaacaccatcgccagcgacgatatccttaacgtgagcgaagctggcgcggggatcaccatcagcggcactaccacggcgcaggccgggcagacgctcaccgtcacgctcaataacaacacgtaccagaccaccgttctggcggatggcacctggagcgtgaatgttccggcagcggatttaagcggattaaccgccagcagttacaccgtgaccgccacggtgagcgacaaagcgggtaacccggcaagcgccgaccacgcgctggcggtagatatcactgcgccggatctcaccattaacaccgtcgcgggcgatgacattatcaacgccatcgaacatggtcaggcgttggtggtcagcggcaccagtacgggcgcggcggcgggtgatgtggtaaccgtcacgctgaacggtaaaaactacaccaccacgctggatgcctccggtaactggagcgtgggcattccggcggcggatgtcacggcgctggcgaccggtagccagaccatcaccgccagcctgagcgatcgcgcgggcaacagcgacagcacgactcacgatgtgaccgttgatcttagcggcccgacgctgaccattaacaccgtctccggcgatgacattattaataatgcggagaaaacccaggatctgaccatcagcggcggctccagcggtctggcgactggcaccacggtcaccgtgatgttgaacggcctggcgtacagcgccaccaccgatagttccggcaactggagcgttaccgtgcctgcttcggcggtcggcgcactgggtgaggcggtgtatcagattagcgccagcgccaccgacagcgcgggcaacagcggcagcaccacccatacggtgaatgtcgaatcgctcctgcctggggtgatcattaataccgtggcgggcgatgacattatcaacgccgctgaaatcgttgtggcgcagaccatcagcggtcaggtcacgggaacggcggttgccgggaatacggtgattgtcaccattggcggcaatcaatataacgccaccgtgcagtcagatttaagctggagcgtcagcgtaccggcgaacgttttgcaggcgctgggtaacggtgaactgaccatcagcgcctcgttgaccaattccgcaaataataccggcaccgcgacgcacgatatcgtgatagatgccaacctgccaggtctgcgcgtcgataccgtggcaggcgatgatgtgattaacagcatcgagcacactcaggcgttggtgatcaccggtagcagtagcggactggcggcgggcgcggcgttgacggtggttatcaatagcgtcacctacggcgcaacggttttagcggatggtagctggagcgttggtgttccggtggcagatgtcacaaactggcctgcggggacggtcaatattgccgtctctggcaccaacaccgccggaaccacaaccagcattagccatccggtcacggtcgatctcgctgccgtggcgatcaccatcaacaccctttccactgacgatgtgattaacgccgccgagaaaggctctgatttgcagctctccggcaccacctccggcgtggaagcggggcaaaccatcaccgttatcttcggcggcaaaagctacaccaccacggttgccgcggataatacctgggggctgacgatccctgccgccgatgttgcaaccttgccagacggcgcagcaaacgtccaggccagcgtcagcaatgtcgcagggaacagcacccaggcaacgcatgcttacagcgttgatgccactgcgccctccgttaccatcaacaccatcgccacggacgatattcttaacgccgccgaagcgggatcggcgctgaccatcagcggcaccagcacggcggaagccgggcagacggtgaccgtaacgctaaacggcgttaattacagcggcaatgtgcaggcagacgggagctggagcgtcagcgtaccaaccggcgatttagctagccttaccgccagctcgtataccgttaacgcctcggtcagcgacaaagccagaaatccggcttcggcaacgcataatctgacggtggaccttgccgctccggtcgtcaccatcaacacggtggcgggcgatgacatcattaacgccacggaacacggacaggcgcagatcatcagcggctcggcaacgggcgcgactaccggtaatacggtttccgtgacgattggcacgaccacctataccaccgtgctggacgccaacggcaactggagcatcggcgtgcctgccagcgtgatttccgcgctggcgcagggcgatgtgaccattaccgctacggtcaccgactccgcaggcaacagcggcacggcctcgcacactgtcaccgtggcgctcggcgctccggtgctcgccattaacaccattgccgtcgatgacatcatcaacgccacggagaaaggcgcggatctggcgattaccggcaccagcaaccagcctgcgggcacgcagattaccgttacgctcaacgggcaaaattacaccaccactgccgatgcttccggtaactggagcgtgaccgttccggcgtcacgggtgagcgccctcggtgaagccacctacacggtgaccgcagccgccactgacgccgatggcaacagcggttccgccagccataacgtacaggttaataccgcgctgccgggcgtcaccattaacgtggtggcaacggacgatattattaacnccgccgaagcgggcgtggaacagaccatcagcgggcaggtgacgggtgcggcggcaggcgacacggtgaccgtcacgctcggcggggcgacttacactgccacggtgcaggcgaatttaagctggagcgtcgatgttccggcctccgcgctacaggagttgggcaacggcgaactgaccatttcggcttcggtgacgaacagcgtaggcaatactggtaacggcacgcgcgaaatcaccatagacgcgaatctccccggtctgcgggtcgacaccgtggcgggcgatgatgtggttaatattatcgagcacgggcaggcgctggtgattaccggcagcagctccggtctggcggcgggcagcaacgtcacgctgaccattaacgggcaaacctatgttgcggcggtgctggcggatggcacctggagcgtcggcgttccggcggtggatgtcagcgcctggcctgcgggatcggtgacgattgcggcgagcggtagcacctctgccggaaatccggtaagcgttacgcatccggtgacggtcgatctctcggcggtggcggtgagcatcaacgccattaccgccgatgatgtgatcaacgctgccgaaaaaggcgcggcgttaacgctctccggcagcacctctggcgtcgaagccggacaaacggttaccgtcacctttggcggcaaaacttacagcgccacggtggctgcgaatggttcctggagcacctcggttccggcggcagatatggcggccctgcgtgatggcgatgccagcgcacaggccagcgtcagcaatgttaacggcaacagcgccaccacgacccacgcttacagcgttgatgccagcgcgccaacggtgaccattaataccattgcgggcgatgatattcttaacgccgccgaagccggagcggctctgaccatcaccggcagcagcacggcggaagcggggcagacggtgaccgtcacgctcaatggcacaaactacaccggcaccgtacagacggacggcagctggagcgtcagcgtaccgtcagccgacttaagcaccctgaccgccagcaantacaccgtgaacgcggcggtgagcgacaaagccggaaacccggcctcggttaatcacaacctgacggtggatacgtccgttccggtcgtcaccatcaacacggtggcaggcgatgatgtgatcaacgcgacggaacacgcccaggcgcagatcatcagcggctccgccactggagcggcaaccggtagcaccgtgacggtgactatcggcacaaatacctttaccacggtgctggatgccagcggcaactggagcgtcggcgttccggcaagcgtcgtctcggcactggcgaatggcacggtgaccatcaatgccagcgtcaccgatgccggaggaaacagcggcagcgctacccatcaggtgacggtcaataccgggctgccgaccattacctttaacgccatcagcggcgataacatcctgaacgccgatgaaaaaggccagccgttgaccatcagcggcggcagtacggggctggcgacgggcgcgcaggtcaccgtcacgctcaacggtcacaactacagcgccaccaccgacgcatcgggcaactggaccttaaccgtgccggtgagcgatctggcggcattaggtcaggccaactatacggtcagcgccagcgccaccagtgcagcaggcaacaccgccagcagccagacgaatttactggtcgacagcggcctgccggacgtcaccatcaacaccgtggcaggcgacgatatnannnnnnnnnnnnnagcgggggccgatcaaaccatcagcggggtggtgactcgcgccgcnnnnggcgatacggtcaccgtgacgctgggcgggaacacttacaccgctacggtacagagcaacttaagctggagcgtcagcgttccgacagccgatctccaggcgttgggcaatggtgatttgaccattaccgcctcggtcaccaacgctaatggcaacaccgggagcggcacgcgggatatcaccattgatgccaacctgccggggctgcgcgtagataccgtggcgggcgatgatatcgtcaacagcatcgagcacgggcaggcgctggtgatcaccggcggcagtagcggcctgaatgcaggtgctgtgctgacggttaccatcaacagtgtggcgtattccgccacggtgcaggcggacggaagctggagcgttggcattccggcggcaaacgtcagcgcctggcctgcggggccgttaacctttgaggtagacgggcaaagcagcgccaataacccagtccgcgtcagccatccgttcaccgtcgatttaacggcggtggcaatcagcatcaacaccgttgccagcgacgacgtgattaacgccgcagaaaaaggcaccaatctgactctttccggcagtaccagcgggattgagagcgggcaaaccgtcaccgtcacttttggcggtaaaacctacactgcaagcgtcgccgccaacgggagctggagtgtaaacgttccggcggcagatctggcaactctgccagagggcgcggcgaatgtgcaggccagcgttagcagcgcgagcggtaacagtgcctcggcgacccatgcgtatagcgttgacgccagcgcgccgacgctcaccattaacaccatcgccagcgacgatatccttaacgccgcagaagccggaagcccgctcaccatcagcgncaccagcaccgccgaaaccgggcagacggtgaccgtcacccttaacggcgcaacctacaccggcactgtgcaggcggacggtagctggagcgtcagcgttcccacttcagccctgggcgcgctcaacgcaagcaattacaccgtcagcgccacggtcaatgacaaagcgggcaaccccggcagcgccagccataatctggcggtagacaccaccgcgccggttctcaccattaacaccgtggcgggcgatgacatcatcaacgatgccgaacatgcgcaggcgctggtgatctccggcaccagtagcggcggggaancgggcgatgtggtgagcgttgtgctcaacggcaaaacctacaccaccaccctggatgcctccggcaactggagcgttggcgttccggcggcagatgttacggcgctgggtagcggtgcgcagaccatcaccgccagcgtcagcgatcgggcaggcaacagcgacgacgccagccgcaccgtgaccgtcagcctcagcgcgccagtgattagcatcaacaccatcgcgggcgatgatgtgatcaacgcgacggaaaaaggatctgatctggcgctttctggcaccagcgatcagcctgcgggtacggcgatcaccgtcaccctgaacggacaaaactacagcgccaccacggatgcctccggcaactggagtgttaccgtgcctgcctcggcggtcagtgcgctgggcgaagcgacctacagcgtgacggcgagcgtcaccaatgctcagggtaacagcagcaccgccagccataacgtgcaggttaataccgcgctgccgggcatcaccattaatccggtggcgacggacgatattatcaacgcttcagaggcaggcagcgcgcaaactatcagcggccaggtaaccggtgcggcggcgggcagcaccgtcaccgttgaactgggcggtaaaacttacaccgccaccgtccaggctgatttaagctggaatgtgagcgtacctgccgccgactggcaggctctgggtaacggtgagttaacggttaatgcctcggtgaccaacgccgttggcaacaccggtagcggcacgcgcgatatcaccatcgatgccagtctgcctggcctgcgggtggataccgtcgcgggtgatgatgtggtcaatatcatcgaacacgctcaggcgcaggtgatcaccggcagcagctccggctttgccgcaggcacggcgttgacggtggtgattaacaaccaaacttacgccgccacggtgttggcgaacggtagctggagcgtcggcgttcctgcgacggatgtcagtaactggcctgcgggaacgctgaatattaccgttagcggggcgaacagtgccggaacgcaaaccagcattacccatccgctgactgttgatctcaccgccgtcgccatcagcatgaacagcatcaccagcgatgatgcgattaacgccgccgaaanaggnnnnncgnnaacgctctccggcagcacgtccggcgtcgaagcggggcaaaccgtcaccgtcacctttggcggcaaaacctacaccaccacggtggcggcaaacggtagctggagcaccaccgttccggcggcggatttggcggccctgcgtgatggcgatgccagcgcccaggtgcgggtgactaacgtcaacggcaacagcgccacagcaacgcacgaatacagcgtcgatagcgccgcgccaacggtgaccatcaacaccattgccagcgataacatcatcaacgccagcgaagcggcggcgggcgtaacggtgtccggcaccagcaccgcgcaaaccgggcagacgctcaccgtcacgcttaacggcactaactaccagaccacggtgcagacagacggcagctggagtttaacgctgcccgccagcgacttaaccgcacttgctaataacggctacaccctgaccgccacggtcagcgatctggcgggtaaccctggcagcgccagcaaaggcgtgaccgtcgataccactgcgccggtgatcagttttaacaccgtggcgggcgatgatgtgattaacaacgtcgaacacattcaggcgcagattatcagcggcaccgccacgggngcggtggcgggcgaccgcctggtggtgaccatcgccgggcagcagtatgtcaccagcaccgatgccagcggcaactggagcgtcggcgtgcctgccagcgtgatttccggccttgcggatggcacggtgaccatcagcgccaccattaccgatagcgcaggcaacagcagcacgcagacgcacaacgtacaggtgaacacggcggcagtgtcgctctcggtcagcactatcagcggcgataaccttattaacgccgccgaagcgggcagtgcgctgaccntgagcggcactggcactaatttcgcgacaggtacagtggtgaccgtgttgcttaacggcaaaggctacagcgccaccattcagagcaacgggagctggagcgtgaacgtgcntgcggcggaagttgcggcactcagtgatggcaccagctacacggttagcgcntccgctcaggacagtgccggaaacagcgccacggcntcgcgcagcgtggcggtggatctcaccgcgccggttatcagcattaacaccgtttcgacggacgaccgcntcaacgccgncgaacagcagcagccgttaacccttaacggctcgaccagcgcggaagtggggcagacggtcaccgtcacctttggcggcaaaacctataccgccacggttgccgccaatggtacctgggcgctgaacgtgcctgcggtggatctggccgcgctcgggcagggcgcgcagaccattaccgccagcgtgaacgatcgcgccggtaaccccggacaggccacgcacgccctgaccgtcgataccgttgcgccaacggtcaccatcgccacggtggcgggtgacgatattatcaacaacgccgagcagcttgccgggcagaccattagcggcaccaccaccgccgaagtgggccagacggtgaccgttacctttaacgggcaaacctggagcgcaacggttggcagcggcggaagctggtcggtgtttattccggcgcagcagtttgccggattaagcgacggcagctacaccattagcgcgacggttagcgatcaggccggaaaccccggcagcgccagccgtggcgtgacgctgaacggcgatgtacctactgtcaccatcaacacctttgcgggcgacgatgtggtgaatgcagcggaacacggctcatcgctggtgatcagcggcaccaccaccgcgcccnnnnggcagacgctgaccctgaccttaaacggcaaaacctacaccaccacggtgcagacgggcggtagctggagctacaccctcggcagcgccgatgtcaccgcgctggcggacggcaacgcctacgtgattaacgcctcggtgagcaatgccattggcaacaccggtagcagtaatcacaccattaccgtcgatctcagcgctccggcgatgggcattaatatcgattccctgcaagccgacactggccttagcgccagcgactttatcaccagcgtcagtccggtagtggtcaacggctcgctcaccgccgcgcttgccagtaacgagacggcgcaaataagtatcgacggcggcacaacctggaccacgcttaccgttaccggcacgacctggcgctataacgacagccgcacgctgaccgatggcaactatctctatcaggtgcgggtgattgacgcagcgggcaacgttggcgcgaccgacagccagaatgtggtgatcgacactaccgcgccagatcccgcggtgaaaaccatcgccatcagcgcgatcaccaccgatatgggcttgatcactaacgattttgtcaccagcgacacgacgcttgcggtgagcggcacgctgggggcgacgctttctgccggtgagttcgcgcaaatcagcattgatggcggcaccacctggcagaatctttcggtaagcggtttgacctggagctatcttgacgggcgtacgctgaccgatggcaactacaactaccaggtgcgggtgatcgacactgccggaaatatcggcgcgaccgccagccagattgtcactgtggacactaccgcgccgctggcgagcaaaaccatcgccattgcgggcatcagcgatgacaccgggttaagcagcagcgattttgttactcgcgacaccacgctgaccgtgcgcggcacgctcggcgcggcgcttgccgccgatgaacgggcgcaaatcagcctcgacggcggcgtcacctggactacgttaaccgtcgttggcaccagctggagctatgccgatggtcgcacgcttactgacggcacctggaactacacggtgcgggtggtggatctggcggggaacgttgggcagaccgcaacgcaaaacgtggtggtcgacaccaccagcccggaagcggcgaaaagtatcaccattaccggtatcagcgatgacaccggaaccagcagcagcgattttattaccagcgacaccacgcttaccgtgcgcggcgtattgggcgcggcgctcggcgctaatgagttcgcgcaaatcagtaccgacaacggcgcaacctgggtgaacgtgaccgtcgccgcagacagcctgaactggagttacgttgacggacgaaccctcaccaacggcaccaccacctggcaggtgcgggtggtcgatctggcgggcaacgttggcgcaacgagcagccagtcggcgctgatcgataccgttaacccggcgcaggtgctcaccatcgccagcatcagcaccgacacggggagttcggcaactgactttatcaccagcgacaccatgctcacgctgaccggttcgctgggggcggggcttgccagcggcgaagtggcgcagattagccttgatagcggcgcgacctggacaacgctcaccaccaacggtacacagtggacttacaccgacagccgcacgctgaccgacggcagctacgtttatcaggtgcgggtgctggatctggcggggaacaccggcccggtggtgtcgaaaacggtggtggtcgatacgattaaccccaccgccacaccaacgattgtgtcgtataccgatgatgtcgggcagcggcaggggacattaagcagttcgcaggccaccgacgacactacgccgctgctgaacggtgtactttccgcgccgcttgccagcggtgaagtggtttacctctaccgtaacgggctgctgttaggggcggtgacgatggtcggcgctctgaactggacctacagcgacagcgggctggtgagcggtgcctatacctacagcgcgcgagtggtggatttggcggggaatatcacctcctccagtgattttgtcctgacggtcgatacctctattccgaccacgctggcgcaaatcaccagccagaccacgcgcgatactacgccgatnnttannnnnnnnntcaccgccgcgcttgccagtgggcagtatgttgaagtggtgatcaacggcaaaacctacacctctgaaccgggcggcgcggtagtggtcgatccggcgcacaacacctggtatgtacagttgccggataccgatgcgctgacagtttccgcgaccgcctataccgttactgcgcaggtaaaaagttcggcgggtaacggcaataacgccaatattagcaacggcacggtgacggttaacgcggcgattgattacacaccgacctggactaccgccagcaaaaccaccgcctgggggctgacctacggcctcgactcgcacgggatgtggacggtgctggcaaaccagcaggtaatgcaatcgactgacccactcacctggtcgaagaccgcgctgacgctgtatcagagcggcaacaactacgccaccagctccattgccgattacgaccgtaacggcacgggcgatctgtttatcacccgtgatgactacggtacgggctatattaacggctttaccaataacggcgatggcaccttttccagcgctattcaggtcaccgtcggcaccctgacgtggtacggctcgattgtggcatttgataaagagggcgacggctatctcgacttctggattggtgacgctggcgggccggactccaacaccttcctgtggaacaacgcaggcacgctggtaggcaactccaccacgtcgaacagcggcggtagcgccacggtgggcggggcggtgacggggtatctttcgctcaacgaaggttctggcgtcgatctgaacaatgacggcaggatcgacctggttcagcacacctataacctgaacaactattacacgctgtcttcgctcatcaaccaggggaatgggacgtttgtctgggggcagaacaccaccaataccttcctgagcggggcgggcagtggcgctatgagcagcagcgtttccatgacctgggccgatttcgatggtgacggcgatatggatctcttcctgcccgccagccagggaagagctaactacggctcgctgttattcaacaccaacggcgtactgggtagcccggtggcggtgggcgcaacggcaaccacctacgccagccagtttagcctggcggtggactggaaccacgacggcctgatggatatcgcccgtatcgcccagaccgggcagtcgtatctttatactaacgtcagcaacgccagcaactggacgcaatcggccctcggcggcagccagagcggtaccaccagcggcgtggcggcaatggactacgactgggacggcgcggtggatgtgctggtgtccaaacagtcgggcagcgtgttcctgatccgcaacaccaacacggtgagctacggcacttcgctacacctgcgcatcaccgatcccaacggcattaacgtctattacggcaataccgtgaagctgtacaactcggcgggagtgctggtcgccacgcaaatcatcaacccgcagtcgggtatgggggttaacgacacctcggcgctggtcaacttctacgggctgaatgccggagaaacctacaacgcggtgctgatcaaatccaccggcaccaccgccagcaatatcgaccagacggtcaacaccagctggggcggtttacaggccaccgatgccactcacgcttacgatctcagcgctgaagcgggtaccgcgagcaacaacggcaagttcgtcggcaccggctataacgacaccttcttcgccaccgcaggcaccgacacttacgacggttccggcggctgggtgtacagctccggcaccggaacgtggctggcgaacggcgggatggacgtggttgatttccggctttcgacggtgggcgtgacggctaacttaagcagcactgccgcgcaggccaccggttttaacacctcgacatttaccaatatcgaaggcatttccggctcgaattttaacgacattctgaccggcagcagcggcgataaccaactggaagggcgcggcggcaacgacacgctcaacatcggcaacggcggccacgacaccttgctctataaactgctcaacgccagcgacgccactggcggcaacggctcagacgtggtgaatggctttacggtagggacatgggaaggcaccgccgacaccgatcgcattgatattcgtgaactgttacagggcagcggctacaccggcaacggcaaagccagctacgtcaacggcgtggcaacgctggatgcgcaggccggaaacatcggtgactttgtcaaagtcacccagagcggcagcgacaccatcgtgcagatcgaccgcgacggcacgggcggcacttttgcgacaactaacgtggtcacgctgacgggcgtgcacaccgacctcgccaccttgctggcgaatcatcagttgatggtggtgtagataatgaaaaaaaatgcccagtccgtggaagcctggctggaggcgatgatcgccgtggcgcgctattatcggctcgatttttctcaggagaatgtgcgcgcgaccgtcaactgggagcgcgacagtaagcgggaggagttactcaccgacatggcgcggcagttagggatggggttgcggttggtggagttttccgccgattcgcttaacccctggcgtctgccgctgatcgcggtgtttgataatcagcagattggcgtgatcacccgtcgcgacaatcatgacaatatcagcgttcagttcagcggtgacgaagggctggaaactacacttaacgtcgcggatattgaagataaaatcgtcgaactggcgctgctgcgccctctcagcgccatccctgacgcgcgggtggatgactatattcgcccgtatcaggcgaactggttctggagtctttcgctaaaagactggcggcgctacggcgatattatgctggcgtcactggtggcgaacgtgctggcgctggcggcgatgattttctcgatgcaggtttacgatcgggtggttccggcgcaatcgtacccgacgctatgggtgcttttcgccggggtgatgatggcgatcctgtttgagttctgtatgcgcatggtgcgtacgcatctatctgatgtgatcggaaagcgggcagacctgcgtatttcggatcgcgtttttggtcatgcgctacggctgaaaaacaacgtgcgatcgaaatccaccggatcgtttatctcgcagatccgcgaactggaatcagtgcgggagcttattacgtccaccaccatcggcgcggtggcggacctgccattcttcctgctgtttgtctttattttgtggatgatcggcggctggctggtgctggtggttttgctggcgctgccgttgctggtgatccccggcctgctggtgcaacgcccgctggcgcggctggcgaacgaaggaatgcgcgagtcagcggtacgcaacgctacgctggtggaagccgtgcagtcgattgaagatattaaactgctgcgcgccgaacagcgttttcagaatcagtggaaccacaccaacgacgtggcctcgtccatcagcatgaagcaacgttttctcaccgggctgctgctcacctggacccaggaagtgcagtccatcgtctacgtggtggtgctgctggtgggctgctttatggtgatgaacggcgacatgaccaccggcgcgctggtcgggacgacgatcctggcttcgcgcaccattgcgccgctgtcgcagatatccggcgtgctctcgcgctggcagcaggcgaaagtagcacgtaacggccttgatgaactgatgaagcgcccggtggatcagccggaacacggcaaactggtgcataaagcggtgctgcacggtaattatcagttcagcaacgcggtgttttattacgacgaagaagagaagattgccgatgtagcgattggcaaactcaacattcaggctggtgagaaaatcgccattctcgggcgcaacggcgcgggtaaatcgacgctactgcaaatgctcgccggaatgcgtatcgcccagcaggggcaggtgttgctggataacatcagtatcgggcagcttgatccggcagatctgcggcgagacatggggctactcagccagaccgggcgactgttctttggttcgctgcgggaaaacctcaccatggggatgccggaagccagcgatgaagatatcgaacgcgcgttaacnctcagcggagcgctgccctttgtgcagaagcagaaaaacggcctcaactacatgattcaggaagggggatttggcctctctggtggtcagcggcaaacgctgctgctggcgcggctactcatctctcagctgaatatcgtcctgctcgacgaacccagcgcctcactggacgaaatggcagaagcgtatttaatcgaacaactgaaacagtggattgggcatcgcacgctgattatcgccactcaccgcacggcgatgctgcaactggtggataggataatcgtgatggatcaggggcggattgtgatggacggcgcgaaagaggccattttgcgtgaacagggcgagctcacagcgcgacgggtggtgttgcaggagaagaataaggggtctgcggcatgaacggacaactgcaatataaccgtggtctgactgaaccccgcctgccgcgttcggcgctggcggtacgcgttaccgctgtgatgctgctctgttttctcggctgggcgtggtacttccagcttgatgaagtcaccaccggcagcggcacggtagaaccttccgggcgcgaacaggtggtgcagtcgctggaaggcggaattctgtatcatctcgacgtgaaagttggcgatattgtcgaacagggccagccgctggcgcagcttaaccgcaccaaaacggaatccgacgtccaggaagcgatgtcgcggctgtacgcggcgctggcaacctcggcgcggctgcgggcggaagtgagcaataaaccgctggtcttccctgacgaactgaataaattccccgaacttatcgagtcggaaacggcgttgtacaacactcgccgcgacgggttgaacaaagccaccaccgggctgacgcaggggattagcctggtcaatcgcgaactggcgatgacccagccgctggtaaaacagggggcagcgagcagcgtcgaagtactgcgcctgcaacgccaggccaatgaactggaaaacaaactcagcgacgtgcgcacgcaatactacgttcaggcgcgcgaagagttagcaaaagccaatgcggaagtggaaacccagcgttcggtgatccgtggacgggaagactctctcaccaggctcaactttaccgcgccggtgcgaggcattgttcaggatattgatgtcaccacggttggcggcgtcatcgcccccggtggtaaactgatgaccatcgtgccgctggatgagcaactgctgattgaggcaaaaatctccccgcgcgatgtggcgtttatccacccggggcaaaaatcgctggtgaaaataactgcctacgattactccatctacggcggcctgccgggagaagtggcggtgatatcaccagacaccgtgcaggatgaagtgcggcgcgatgtttattactatcgggtgtacattcgcactttcagcaaccatctggaaaacaaaagcaaacagcagtttccgatattccccggtatggtggcgacggtcgatatccgcaccggcaaaaaaagcgtgctggattatctgttgaaaccctttaacaaagcacaggaggcgttgcgcgaacgatgaacattagcgatgtagcaaaaattaccggcctgaccagcaaagccattcgcttctatgaagagaaggggctggtgacgccgccgatgcgcagcgaaaatggttatcgaacctacacgcagcagcatctcaacgaattgaccttactgcgccaggcgcgnnaggtgggctttaacctggaagagagcggcgagctggtgaatctgtttaacgacccgcagcgtcacagtgccgacgtcaaacgtcgcacgctggagaaggtggcggagattgaacggcatatcgaagaactgcaatctatgcgcaaccagctactggcgctggcgaatgcctgccccggtgatgacagcgccgactgcccgattatcgaaaatctctccggctgctgtcatcatcgggcggggtgaaaatcagtgaatccccgtttgcaccgaaagaatatgctgcaaactttctaccataatgcgccccgactgaaataagccttcctggatttcgttgttaacattcacagcgtgaaccagggaggctaataatactacttgcaagaaggcaaaaataaacgcaccgataatcataatatgcgtcaggggtattttcctttgctccttcattttaaataacccacaaactggccttctttcattaaggcgacttttcctgtgtgatgataaacaatgacgttatatagacctgactgataaacagtggcatctttattgtcttcatcaattgcacataatgaatcattgagataagcaaagtttttactgctcattctaaaggtcatgccaaatcctttataaatggctttctttgccgcctgggcgtgttgtgcggcttctgcatttttaaatgcctgtgcctcggatgcacttaaaatagccgcctgacgctgctgttctgcgaggtaacaggtgtcatgactgacgccctgcgcctggcaatctgcgatgcgggaagtgggtgaactacagccagccagtaatataaccgccagcagggaaaacgatttaatggagctattcatcattgttaaccttaaataatgtacaaattaatgaagaggtgaacccggcaagcttccttgctcttatttatattgaggattgaaatattagaacgaatatcccacgccgacacctgcgccgaaatcagattgtgtatccgcagaaataccggctttaagtaccgtatgcgttccggcattaaatgatgttccgacagacaccgcagattcaccgttgaaggttcccgctcccgctgacaccatcatcacgtcaccggttttaacctgtggttgtgaggcgatagcgatggcagatgcagttcccgcattggcttctttacgattgtcatcaacttcgttttttagcgaactgaaatggttattgagcgtgttaatttgctggctgttatctgcaacccgtttttgggtgttggttaactgttggtgcgtttgggttacgtcttgtgacaggctgtcaatttgttcatgtgcctgggcagactcctgcgccagactttgcatttgtttatcgtattgagtcctttcattttgctgttgtactgccacatcggttgtcagcgcattcattttctgcccttgttcagtggcggtgcgctgattagcctcattttgagccgccagtctggcattaatcatttcctgataatgcgcggtattttgcgtatctccagtcgcggcgagcgttttttgtgtggctacgatctgcgcctgttgctctgtaatttgcgtttgctgggcgtcagttaccgcagactgtcgggcgttgatcatgctctgataacgggcagttgtctgtacatcacctgtagcggcaacggttttttgtcctgcgtcaggatctgtctggacagtgggagtctgagtggtatcaggtgtttcagaagggatgtagtgatgttcagtcaaataggtatacgcagcggggctgttgtctgtgcgttctaaaaagcgggtaatcttctgctcaatctccgattgcgacatgccagagttaatggctgaaagctctgttgccgccgcttcaatggtatcaccagctaaaacaacagggctggatgttgctgaaattatgagtgccagtaaagctacgtttacagttttcattcattttctcttgttcaaaataagtcgtattaatgtttctataagaannaaataatattgttttaagaaataaactgcgttgcaatttaatcgaaatctacgccgccatttgtgtgatgtaaagcgcatttttgtctgttgtaagcgtaaacaccatcaataaaaaacaaaaatggtttcnnnnnnaaataaaaaaggaaatcatttcgtgctctttcaatgtaaaaaagagtaaagacttgttttgataagcgaaataaattctgtttctggactaaacgtgaagcggttcctgatgtgtgctaaaatgcgtttctttgataaatctcaatttttaagaggtttacgccaggcaggaaaatttaaatgaatgaatttgagaagatttttaatgaaatgaatctggaccgggcattgctaccgatcctttttcgttcgaaccggtcgacagtgtggaagtatttaagcggcgatagtacggctcctgcctctgccatgtcgctgattatgctgttgcagttgatacagaaacgaaaccccgatctgttagccgaatggttaacgctttctgatttcaccattccgccagaagtttacctggaccagcctgattactggaaagggtgggtgtatacgcaacacaaggtcaataaaaacgtcctggaatatctaaaaaaacactatccggatgaagaccaaaaaagtatgagtaaaggccgggaagagtaaattgccaatgccagttaacatttaacatggcggaggcggcctacggttttggcgtgatatgacgcgcccgcgtcgcatcaggcgtcggtgcacgactgccggatgcggcgtaaacgccttatccggcctacgattcgggcgcagacttccgggcatgataagacgcgtcagcgtcgcatcaggcgatgaccgcacggatgatcagcgttatcccttctatcgcaatgacttcaacatgcgtacctgcgccgagatcctcgctggcgctgacaggccatgaactgtcaccgacgcgcatatgaccgcgcccgttgaccagcggagattccagcacaaaacgtcggccaatcagctgctgcncgcgctggtttaaatgactgtcgctgtgcttttgttcgcgcacccgccgcgacaaccatttccaccacagccaggcggcgagcagcgtcaggacggcaaacatcaccccttgccactcccaacccagcggcaccagccagaccaccaggccagtaatcactgctgccacgccactccacaacaaataaccatttccgcccagcatctcggctgccagcagcaaaccgccgagactgagccagaaaatatgtggatgaacgactattaactccatcatggctgagtccgcttgttggcgctgtctttcaccagctcggcaatcccggcaatcgaccccatcaggctgctggcctctaatggcatcatcactactttgctgttactggaggaaccgatctgctgtaacgcttcggtgtatttctgcgctacgaagtagttcaccgcctgaatatcaccggaggcgatggcttcagacaccattttggtggcgcgggcttctgcttcagcggaacgttcacgcgcttcagcctgtaaaaacgccgactgacgttcgccttccgctttcaggatttgcgactgtttttcaccttcggctttgaggatttccgcctgacggatcccttccgcttcaagaatgtaagcgcgtttggtacgttccgctttcatctgcgcgttcattgaagagataagctctgccggtgggcgcacgtcgcgaatttcaatacgggtgactttaatcccccacgggttggtggcctcatcgacaatacgcagcaggcgtgagttgatgctgtcgcgctgagagagcatttcgtcaagttccattgaacccaacacggtacggatgttagtcatggtcaggttgatgatcgccagctccagattgctgacttcataagccgcgcgtggcgcgtcaatcacctgaataaaacagactgcgtcgatggtaacgttggcgttatctttcgagataacttcctgggaagggatatcgagcacttgctccatcatattgatcttgcgaccaatgcgatccataaacggcaccaccagactgagccccggctgtaacgttttggtatagcgaccaaaacgttctaccgtccattgatagccctgcggcacgattttgacgcccgcgccgacaatgaccagcgcgacaaaaatgagaatcgggataaagataagcatcggaaaaacctcctgttgtaccgtccataatcagcaaaattgctgcttgattaaacaaattatacctgattactgaaagagagttcccccttattcctgcgaaggataaactgtttttagtaaaaatcagaaaaagggaacagcgatgcaggaaaatagtcctttgcttcagctacaaaacgtaggatatctggcgggtgatgcgaagattcttaataacatcaatttttcgctgcgtgctggcgaatttaagttaattaccggtccttctggttgtggcaaaagtacgctgctaaaaatagttgcttcattgatcagcccaaccagcggaacgttactgtttgaaggtgaggatgtcagcacactaaagccagaaatctaccgtcagcaagtctcttactgcgcccagacgccgacgctgtttggcgatacggtatacgataatctgatctttccctggcagatccgtaaccagcagcctgacccggccatttttctcgattttcttgaacgcttcgccttgccggacagcattttgacgaagaatatcgccgagctatctggtggtgaaaaacaacgcatctcattgattcgtaacctgcaatttatgccgaaggttttattgctggatgaaatcaccagtgcgctggatgaaagtaataaacataacgttaatgagatgatccatcgttatgtgcgcgagcaaaatattgccgtgctgtgggtgacacacgataaagacgaaattaatcatgcggataaagtgattacactgcaaccgcatgccggagaaatgcaggaagcacgctatgaactcgcataatattactaacgaatcattagcactggcattaatgctggtagtggtggcaatcttaattagccataaagaaaaactggcgctggagaaagatattctctggagcgtcgggcgcgcgataattcagctgattattgttggctatgtgctgaagtatattttcagcgtggatgatgccagcctgacattattgatggtgttatttatctgctttaatgcngcgtggaacgcgcaaaaacgcagtaaatatattgctaaagcttttatctcatcgtttattgccattacggtcggggcgggaattaccctggcggtgctgattctctcagggtcgattgaatttatcccgatgcaggtgatccctatcgccgggatgattgccggtaacgccatggtagcggtggggttgtgttacaacaatttagggcaacgggtcattagcgaacagcaacagattcaggagaaactgagtcttggcgcgacgccgaagcaggcttcagcgatattgattcgcgacagtattcgcgcggctttaattccgacggtcgattcagcaaaaacggttggcttagtgagtttaccaggaatgatgtccgggctgatatttgccgggattgatccggtgaaggcgattaaatatcagattatggtgacctttatgctgctctcaaccgccagcttgtcgaccataattgcctgctatttaacctatcgtaagttttataattcgcgccaccagttggtggtgacgcaattgaagaagaaatgatgcgatgccggatgcgcagcatcgcatccggcgttgtggttcatgtgccgatcaacggaatatcaatacaacaatgcatacagctggcggcgatacttcgacgccagtgcatcacccgtacccagcgcagcgaggatctcctggaacgttttacgcgtctgaccgtctgcggcggtgagatctttacgcagatgcccgaacagcaactccagcgcctcttcattgcgcccaacctgatgcagttgcagcgccagttgcgtcgccagtgcggcatcttctggattctccgccacctgctgttgcaactgttgaatttccggcgtatcagccgcctgcttcagcagttcgatttgcgccaccagcccctggtagcgggtgtcctgatcctgcaacggaatggttttcagcaccgcttccgcatcttcagaacggttcagcgcaatcagcgtttctgccagcagcaggccgatctccccgttctgattcgacaactgccaggcgtctttcagcaatggcagggcatcggtgtaattgccttcctgcatcagttgcatcgcctgctgcgctttcagctcttcttcgcgcggcagcactttatccagcagggcgcggatcgcctcttccggttgcggcccctggaagccatctaccggttgcccgttctggaacagatacacggtcggaatcgcgcgcagaccaaactgggcggcaatcatctgctccgcgtcgcagtccagcttcgccagaataaattgcccgttgtactgcgccgcaaggctttccagaattggggttaactgcaaacagtgctggctacgttcagaccaaaaatagaacagcaccggagtggtcatcgactgttcaagaacctgttgcaggttagattcgttaatgttgacaatattttctacggacatggagtcgctctctgttgtcgatattttctttgacatgggggcttaagcgcgcgcttcaactcacccctgcaatattttgtccatcacgcgccccggcagcaggcgcttaagcaccattaccgcccaggtcaccagcgttaccggatagcgcatcttcggcttctcgctaataaaagcatggcgtactttgtccaccaccgcttccggtcccaacgtaaagcgggcggcgatgccgggattttcgactggtttatcactttgcgtctggttgacgttgtcggtgaagcgagtacgaatgggaccgggttcgatcaggctgactttaattccgctgcggcgcagctccatgcgcagcgcgtctgaccacgcctccagcgcatatttactggccgcgtaagcgccacgacccggtgtggagattaatcccatcaccgatgaggtcatcacaatacgcccttcaccgtgcggcaacatcgcgggtaacaggcgcatggtgagctggtgtgcgccgaaaaagttggcggaaaactgctgttccatctgcgcacggctgatggtggaaagggggccatacatgccgaatccggcattgttaaagatcccatacagacaattatcggtcagggcgatcacctcgtcggctgcgcgatcaacactttctggtgaatccagatcgatcaacacgccggtaaatcccatgctgttcatgcgctcaacatcatccggtttccggcaacctgccagcacatgaaaaccctggcgttttaattcgagcgcgctttccaggccaattccactggaacatccggtaattaagaccgatttttgcataactttacctgtcaggatctccgttgctttatgagtcatgatttactaaaggctgcaactgcttcgccatccagtcggcaataaacggctgggcgtcgcggttgggatgaataccgtcatcctgcatccattgtggcttgaggtagacctcttccattaaaaagggcagcagcggaacatcaaactctttggcgagtttggggtaaatggngctaaaggcttcattataacggcgaccatagtttgcaggcagacgtatttgcattaacaatggttcagcgttggcggctttgacatcctgcaaaatctggcgcagcgtttgctcggtttgctgtggctgaaaaccacgcaaaccgtcattgccgcccagttcaaccagcacccaacgcggctgatgctgtttcagcagagccggaaggcgcgccagcccttgttgcgaggtgtcgccgctgatgctggcattgactaccgacgttttactctgccacttatcattcaacaaggcaggccaggccgcgctggcagacattcgatacccggcgctcaggctatcacccagaatcaataacgtgtccgctgcggcggcacggaaggttaacaggaccagaaacaggaagggcaaatgccagcggaaaacattgttgaagttcatcatcttaagaagtccgtcggtcagggggagcatgaactctccatcctcaccggagttgagctggttgtcaaacgtggcgagaccatcgcactggtgggcgagtcgggatcgggtaagtcaaccttgctggcgatcctcgccgggctggatgacggcagcagtggcgaagtgagtctggtgggacaaccgctacataatatggacgaagaagcgcgggcaaagttgcgcgcgaagcacgtcggctttgtttttcagtcatttatgttaattcctacccttaacgcgctggaaaacgtcgagcttccggcgctgctgcgcggtgagagtagcgcggaaagtcgtaacggagcgaaagcgttgctcgaacagttagggctgggtaaacgtctggatcatcttccggcacagctttccggcggtgaacagcaacgagtggcgctggcacgagcctttaacggtcgacctgatgtgctgtttgccgacgaacccaccggtaaccttgaccgccagacgggcgataaaattgccgacctgctgttttccctcaaccgtgagcatggcaccacgttgattatggtgacccacgacctgcaactggcggcacgctgcgaccgctgcttacggctggtgaacgggcagttgcaggaggaagcatgattgcacgctggttctggcgcgaatggcgctcgccgtcgctattaattgtctggctggcgctaagcctggcggtggcctgcgtgctggcgctgggcaatatcagcgatcgcatggagaagggcttaagccaacaaagccgggagtttatggcgggcgatcgggcgttgcgcagttcgcgcgaagtgccgcaagcgtggctggaggaagcgcaaaagcgcggcctgaaagtcggcaagcagctgactttcgccaccatgacatttgcaggcgacacaccgcagctggcgaacgttaaagcggtggatgatatctacccgatgtatggcgatctgcaaaccaatccccctggcctgaaaccgcaggcgggcagcgtattgctggccccacgcctgatggcactgcttaacctgaaaacgggcgacaccattgacgtgggcgatgccaccttgcggattgccggagaagtgattcaggaaccggattccggttttaaccccttccagatggctccgcgtctgatgatgaatctggcggatgtcgataaaaccggagccgtgcagccggggagtcgggtcacctggcgctataaattcggcggcagcgagaaccagctcgacagctatgagaaatggttgttacctcagcttaaacccgaacaacgctggtacggtctggaacaggacgaaggcgcgctggggcgatcgatggaacgctcgcaacagttcctgctgctttcggcacttctgaccttgctgctggcagtggcagcagtggcggtagcgatgaatcattactgtcgcagtcgctacgatctggtggcgatcctcaaaacgctgggggcagggcgagcgcaactgcgtaagctaatcgtcggtcagtggttgatggtgctgacgctttcagccgttaccggtggggcgataggcctgttgttcgaaaacgtgttgatggtgctgctcaagcccgttctgcctgctgcactaccgccagccagcctctggccatggctatgggcgctgggcaccatgacggtcatctcgctgctggtggggctacgaccataccgcttgttgctggcaacgcagcctttacgcgtattacgtaatgatgtggttgcgaacgtctggccgctgaagttttatctgccgattgtcagtgtggtggttgtgctgctgctcgccggattaatgggtggcagcatgctgctttgggcggtgctggcgggcgcggtagtactggctttgctgtgcggtgtgctgggctggatgctgctgaatgtacttcgccgcatgacgctgaaatcgctgcctctgcgcctggcggttagccgcctgttacgtcagccgtggtcaacgttaagccagctttcggcattttcgctctcctttatgctgctggcactgctactggtgctgcgtggcgatctgctcgaccgctggcagcagcagttaccgccagaaagcccgaactactttttaatcaacatcgccacagaacaggttacgccgctaaaagcgttcctcgcggaacatcagatagtcccggaatcgttttatccggtggtgcgagcgcggctgacggcgattaacggcaagccgacagaaggcaatgaagatgaggcgctcaaccgcgaactcaatcttacctggcaaaatacgcggcccgatcataatccgattgtcgccggtaactggccgccaaaagctgatgaagtttcgatggaagaggggctggcgaaacgcttaaacgttaccctcggcgataccgtgacttttatgggcgatacccaggagttccgcgctaaagtgaccagcctgcgcaaagtggactgggaaagtctgcggcctaatttctattttattttccctgaaggggcattagacgggcaaccgcagagctggcttaccagtttccgctgggagaatggcaacggcatgttgacgcaactcaaccgccagttccctaccattagcctgttagacattggcgcgattttaaaacaggtcggtcaggtgctggagcaggtaagtcgggcgctggaggtgatggtggtgctggtcaccgcctgcggtatgttgctgttgctggcacaggtgcaggtgggaatgcgtcagcgtcatcaggagctggtggtgtggcgcacactcggtgcggggaaaaaactgctgcgtaccacgttgtggtgtgagttcgccatgcttgggtttgtttccggcctggtggccgcaattggtgcggaaacggcactggcagtgttgcaggcgaaagtgtttgattttccgtgggagccagactggcgattgtggattgttctgccgtgcagcggtgcgctgctgctgtcgcttttcggcggctggctgggcgcgagactggttaagggtaaggcgctgttcaggcagtttgcggggtgatgagagtaaataaggggcgttctggttgaatggaacgccttgtttaaattaattctacaatatgtttcattgatgatgttattgaattggtgatttcctatctttctattgctgatattaatctgaatcggtggagtttaataattttaaatatagccctacaaaaataactcagactaataaaatcataaatcatatgcgttgaatggatattatccatatagtgaatttgttgatgatgaattcatctnnnnnnnnnnnnnnnntttaataaaatattgaaagtgacctgtaataacagttgttgttgattgagaacaaataagtttatgtgaaaaatatataaatacattagctggtcttgtgtgtcattttattttttttgttgctaacacagggatatgaacaataactaaaagggcactttatatgagcggaaaaccagcggcgcgtcagggagatatgactcagtatggcggtcccattgtccagggttcggcaggtgtaagaattggcgcgnnaactggcgtggcgtgctcggtgtgcccgggcgggatgacttcgggcaacccggtaaatccgctgctgggggcgaaggtgctgcccggcgagacggaccttgcgctgcccggcccgctgccgttcattctctcccgcacctacagcagctaccggacccggacgcctgcgccggtggggatttttggccccggctggaaagcgccttctgatatccgcttacagctacgcgatgatgcactggtactcaacgacaacggcgggcggagcattcactttgagccgctgctgccgggggaggcggtgtacagccgcagcgagtcaatgtggctggtgcgcggtggtaaggcagcgcagccggacggccacacgctggcgcggctgtgggggggcgctgccgccggatatccggttaancccgcatctttacctggcgaccaacagcgcacaggggccgtggtggatactggggtggtcagagcgggtgccgggtgctgaggacgtactgccagcgccgctgccgccgtaccgggtgcttaccgggatggcggaccgcttcgggcggacgctgacgtacaggcgtgaggccgccggtgacctggccggggaaatcaccggcgtgacggacggtgccgggcgggagttccgtctggtgctgaccacgcaggcgcagcgggcggaagaggcccgtaaacagcacaccgcttctttatcttcccctgacaccccccgccctctttcagactcagcgttccccgacacactgcccggtaccgaatacggtcccgacagaggtatccgcctttcggcggtgtggctgacgcacgacccggcatacccggagagcctgcccgctgcgccactggtgcggtacacgtatacggaagccggtgaactgctggcggtatatgaccgcagcaatacgcaggtgcgcgctttcacgtatgacgcgcagcacccgggccggatggtggggcaccgttatgcgggaaggccggagatgcgctaccgctacgacgatgcggggcgggtggtggagcaactgaacccggcaggcctgagttaccgctaccagtatgagcaggaccgcatcaccgtcacggacagcctgaaccggcgtgaggtgctgcatacagaaggcggggccgggctgaagcgggtggtgaaaaaagaactggcggacggcagcgtcacgcacagcgggtatgacgcggcaggaaggctaacggcgcagacggacgcggcgggacggcggacagagtatggtctgaatgtggtatccggcgatatcacggacatcaccacaccggacgggcgggagacgaaattttactataacgacgggaaccagctgacggcggtggtgtccccggacgggctggagagccgccgggcatatgatgaaccgggcaggctggtatcggagacatcgcgcagcggggagacagtacgctaccgctacgatgatgcgtacagtgagttaccggcgacgacaacagatgcgacgggcagcacccggcagatgacctggagccgctacggtcagttgctggcgttcaccgactgctcgggctaccagacccgctatgaatacgaccgcttcggctagatgacggcggtccaccgcgaggaaggcatcagcctttaccgccgctatgacaaccgtggccggttaatctcggtgaaagacgcacagggccatgaaacgcggtatgagtacaacgccgcaggcgacctgactgccgttatcaccccggacggcaaccggagcgagacacagtacgatgcgtggggaaaggcggtcagcaccacgcagggcgggctgacgcgcagtatggaatacgaccttgccggacgcatcaccacgctgaccaacgagaacggcagccggagtgagtttacctacgatgcgcttgaccggctggtacagcagcgcggctttgacgggcggacgcaacgttaccactatgacctgaccggaaaactcacgcagagtgaagatgaggggcttgtcaccctctggcactacgacgaatcggaccgcctcactcaccgcacggtgaacggcgaaccggcagagcagtggcagtacgacgagcacggctggctgacagaaatcagccacctgagcgaaggccatcaggtggcggtgcattacggttatgatgataagggccgcctggccggggagcgccagacggtgcataacccggagacgggggaactgctgtggcagcatgagacagagcacgcatacaacgaacagggtctggcaaaccgcgtcacgccggacagcctnccnngggtggagtggctgacctacggcagcggttatcttgcggggatgaagctgggcgggacgccgctggtggagttcacgcgcgacaggctgcaccgcgagacggtgcgcagcttcggcaataacgcatacgaactgaccagcacatacactcccgcaggccatttacagagccagcgcctgaacagccaggtgtatgaccgtgactacgactggaatgacaatggcgacctggtgcgcatcagcggcccgcgacagacgtgggaatatggctacagcgccacgggcaggctggagagcgtgcgcacccttgcatcagacctggatatccgcatcccgtatgcgaccgacccggcgggaaaccggctgccggacccggagctacacccggacagcacgctcacggcgtggccggataaccgcatcgcggaggatgcgcactatgtctaccgacacgatgaatacggcaggctgacggagaagacggaccgcatcccggcgggtgtgatacggacggacgacgagcggacccaccactaccactacgacagccagcaccgcctggtgttctacacgcggatacagcatggcgagccactggtcgagagccgctacctctacgacccgctgggacggcgaatggcaaaacgggtctggnnnngggagcgtgacctgacggggtggatgtcgctgtcgcgtaaaccggaggtgacgtggtatggctgggacggagacaggctgacgacggtgcagactgacaccacacgtatccagacggtatacgagccgggaagcttcacgccgctcatccgggtcgagacagagaacggcgagcgggaaaaagcgcagcggcgcagcctggcagagacgctccagcaggaagggagtgagaacggccacggcgtggtgttcccggctgaactggtgcggctgctggacaggctggaggaagaaatccgggcagaccgcgtgagcagtgaaagccgggcgtggcttgcgcagtgcgggctgacggtggagcaactggccagacaggtggagccggaatacacaccggcgagaaaagttcatctttaccactgcgaccaccggggcctgccgctggcgctcatcagcgaagacggcaatacggcgtggagcggggagtatgatgaatggggcaaccagctgaatgaggagaacccgcatcacctgcaccagccgtaccggctgncggggcagcagtatgataaggagtcggggctgtactacaaccggaaccggtactacgatccgttgcaggggcggtatatcactcaggacccgatagggctggaggggggatggagtctgtatgcgtatccgctgaatccggtgaatggtattgatccattagggttaagtcccgcagatgtagcgctaataagaagaaaagatcaactaaaccatcaaagagcatgggatatattatctgatacttatgaagatatgaagagattaaatttaggtgggactgatcaatttttccattgtatggcattttgtcgagtgtctaaattaaatgacgctggtgttagccgatcggcgaaagggctgggttatgaaaaagagattagagattacgggttaaatctgttcggtatgtacggcagaaaagtaaagctatcccattctgaaatgattgaagataataaaaaagacttggctgtaaatgaccatgggttgacatgtccatcaacaacagattgctcagatagatgtagtgattatattaatccagagcataaagaaacgataaaggctttacaagatgctggctatctcaagtaatctatcaaagatgataatatttattattgctattataatcattgttnttttatgcgtaattacttatctttatttatacaaagatgaatctcttgtaagtaaacattacataaactatatggcaataccagaaaatgatggagtttttacatggctcccagatttttttccgcacgtagcggtggatatatcaatatacacaaatgtagaagatgattatttttttcttatttttccctaacaaatgatgatgggggtaggtttaagaaaacattgacagtgagggccagggaacaagtggcgaaaatcgtatcaaagaatgatccagatacaaaaaaagtgtggtgtaaatatggtaagataccagggcaaggggatggtgtaaacctttttttgttggtgaaattaatgttacgcattattttataacaaatattggagctggattgcctgatgcttgtgcagagtaattgcttgaattaagagtctatcccatatcgaagtcgtcaacttcgtagtgaggaaaagtaaaattcctgactgagaaaagacatgtcggctattgtgtaaagccatatagctcagacgatgaatatctactcgtattcagttgtttattgagggtgagttccgaccctgaaacaacaaataaaatgaacagtcagagagtttacatagaattgcactggtcttttacgatatctgacattgtgtaatacatattcagccatgcattaattaaaatgttacgtgtttaatgtgagtccctatctgaaaataaataatccttccggattannataaattcttgccgggaaagaaagaggaaataaaccattagcggaaaaccagcggcacgccagggtgacatgccccagtacggcggcccgatagtccagggttcagcgggggtactgatagtcgcgccgactgcatcgagaactccatacaactttttacggaacgtcacctgataaaatttgttcagtatcgtcttttgagattctcaaggttatggagtaaccagacagaacggacaccactgtcggagataaaaaccccctgtttacgcagttcgttgctggcccggtgctgaccatgtgtcgggaaagcgacggcgtaatcaacaacagcctgttcagttgcctcatcggtacggttcttaaggttaggagcgcggcgactacgattaatctgcgcatccacaccgccttcagcgaccagttcgcggtaacgataaaacgtatcacgcgaaacgcccatgattttacaggcttttgatacgttgctgagttcttcagccagattgagcaaaccggctttgtgtttgatgacgggattggcagtatgaagcatgagagttacctcttgttttggataaggattcgacactcatatcaaaaccggtaactctcaacctttcaaggccatgtgtcagatcaagtcgcgactaatacaaatacgtccctcattactgcgccttaacccattccgccacttccgcccactcaccgcgaaagacaactttttccgcttttttctcaagctgatagcgatacatctggtcgtaatattcttcaagtaacggcaccagccaggccagatgaccgtcggtgctgccggtggtgagttgcgttgtcagtgctgcatccagccttgcagccagttcgttatatcgctgtagccccagccgacgcttaatagccgaaagtccgtgatgcaggtattcgcaatattcctgccagccctgttcgtcgccgtacgcgtgggtaaaatcatgatgcatacgcaagaaatactcttcgttcaggcgctcaagacggatctcaaacggatcttctaccaccgcaatcgccgcctgagtcattcgctcgcgcaggcattccggcaggtgattcgaaccgatcatccggctttcgtcttccagcacccacaggcgcaaattctgacgggcgtcggtttttagcatttcggcagccagcaggttttcaaaactcgcctggctaagttgtggttgtaacgtgcgaccaaacgccgaaccgcgatgacgcgccaacccttccagatcaacaccgttcggctgttgctgcactaacagcgttttaccgctgccggtacaaccgccaatcagcactatcggtttttgtgccagttcaatagtcgcctgaatcgcggtctggcgcagtgccttataaccgccttccaccagcggataatcaatccccgctgcatgcaaccagctttgcacaatatgtgagcgctgaccgccacgggcgcagcagagaataccttgcggattttgcaggcaggctgcccgccaggcgtccatgcgctgctgacgaatttcacccgcaaccagtttatgtcccagcgccagcgctgcgtctgagccttgctgtttatagcaggtgccaacggcggcgcgttcatcgttattcattaacggcagattgatagcggcgggcattgcgccttgctcaaactcgataggggcgcgaacatcaataatgggcgtatcagcaatcagcagggcacgatagtcctgttccgtgtgtctctcttgcatagttaaaagtgaacctcaaatcagcttgcgcgctattttacgcgccaacgcgcaaggaaacttgatttttaactgcgtgggttgccgaaaatttctaaaaatccgctgatttccggcctgcgctgggtaaacaaggtcacaatatcttctaccgctttgccgctgccaaatttgcgccatgccagactcaatggcgaaggagggcgcatcgttgggattacccggctgaccagttgttgattatcgatcattgactggcaaagcgattttggcaaaaaaccaatgccaacgcccgccagatgggcggcgattttcgtttccatatcaggaacaataatctctttttgccctggcaatcgccaggcgacgcgtttggttaaggtgcgggcgctgtcttcaannnnnaccgccggaaagcgccgcaactgcgcttctgttagcggctcttcaacgttcgccagcggatgatccgccgccatgacaaatcgccattgcaccgatcctaagggatcaagactaaaggtatttgccagcgcctcggttcccgtgacgccgatagccagtgaaaaaccttcgtacaatagcgagtcccagacgcccatatagatttgtcgggagatgtgaaactgggtaaaggggtaacgttcattcagccacgccagcaactgggcgacggcctgggggttgtagagcaggttgttgatgacaatattcacctggcgttccacgccatcattcacctgttgcagctcgctgggcatactttccagccagctcagccagtctctggcctgggaaagtagatgctcgccagccgctgtcaacgttacgctacgagtcgtgcgaaaaaacagcgccactccggtattctcttccagaagtttaatgcgataactgatcgtcgccgtggttttacataatcgttctgccgcttttgaaaaacttcccgtttcagcaaccgcaatgaaagtccgcaaggtttctggatcgaacatcttcaggtatccccttttaaatccgcaagttgcgtgattttcttatcctctgatttatcagtatttttacatgataaccctgttcaatttgtggactaaatctagttttggaaaaatattccaacttttgtgttgatgttgttctcttaaggttttagattgcctgttattgaaaccaagctgaccggtcggcgttggttgaacggaattatgttacaaggacaaaaagatgaaacttcaggtattaccgttaagtcaggaagcctttagtgcttatggcgacgtaatcgaaacgcagcaacgggattttttccatattaacaatggcctggtggagcgttaccacgatttggcgctggttgagattcttgagcaagaccgtacgcttatcagcattaaccgagcgcaaccggcgaatctgccgctgaccattcacgaactcgaacgtcatccgctgggtactcaggcctttatcccgatgaaaggtgaggtgtttgtggtggtcgtagcgttaggtgacgacaaaccagacctgtcaaccctgcgggcgtttattaccaacggcgaacagggagtgaattaccatcgtaacgtctggcatcacccacttttcgcctggcagcgcgtcaccgattttctgaccatcgatcgcggcggcagtgacaactgtgatgttgaaagtattcctgaacaggaactctgttttgcgtgacgcctgcaaccgacttgcataagataaactaattgttcattgtttatgctcacttgtaggtcggagttaacgtaggtatgacggaagttagacggcgcggcaggccaggacaggnggagcctgtggcacagaagggcgcacaggcattagagcggggaattgcgattctgcaatatctggaaaaaagtgggggaagttcgtcggttagcgatatttctctcaatctggatttgccgctctccacgacctttcgcttgctgaaggttttacaggcagcggattttgtctatcaggacagtcagttaggctggtggcatataggattaggtgtctttaacgtcggtgcggcgtacatccataaccgcgatgtcctctccgtcgccgggccgtttatgcgccgcctgatgttactttccggcgaaacggtcaatgtcgcgatccgtaacggcaatgaagcggtattaattggtcagttagagtgtaaatcgatggtcaggatgtgcgcgccactgggcagtcgtctgccactgcatgcttccggtgcgggcaaagcgctgctttatccgctggcggaagaggagttgatgagcatcattctgcaaaccggtttgcagcagtttacgccaactacgcttgtggatatgcccaccctgctgaaggacctggaacaagcgcgtgaactgggctataccgtagataaagaagagcatgttgtaggtctgaattgcatagcttcagcaatttacgatgatgtaggtagcgttgttgccgctatctccatctccgggccttcatcaagactgacagaagatcgttttgtcagtcagggtgagctggtcagagacaccgcccgcgatatcagcacggcgttgggactgaaagcacatccatagtgtctgtcgcatcccgctctgcggagcgggttttttnnnnaaaatttgaaagttggaaaatttttccaattaannnnggtaggaataaaatggcaaaaatgagagccgttgacgcggcaatgtatgtgctggagaaagaaggtatcaccaccgccttcggcgttccgggagctgcaatcaatccgttctactcagcgatgcgtaagcacggcggtattcgtcacattctggcgcgtcatgtggaaggtgcttcgcacatggcggaaggttatacccgcgcaacggcagggaatatcggcgtatgtctggggacttccggtcctgcgggcacggacatgatcaccgcgctctattccgcttctgctgattccattcctattctgtgcattaccggccaggcaccgcgcgcccgtctgcataaagaagattttcaggccgtagatattgaagcaatnnnnaaaccggtcagcaaaatggcggttacagttcgtgaagcggcgctggtgcctcgcgtgctgcaacaggcatttcacctgatgcgttctggtcgtccgggtccggtactggtggatttaccgttcgacgttcaggttgcggaaatcgagtttgatcctgacatgtacgaaccgctgccggtctacaaacctgctgccagccgtatgcagatcgaaaaagctgtagaaatgttaatccaggccgaacgtccggtgattgttgccgggggcggggtaatcaatgctgacgcagctgcactgttacaacagtttgctgaactgaccagcgttccggtgatcccaacgctgatgggctggggctgtatcccggacgatcatgaactgatggccgggatggtcggtctgcaaaccgcgcatcgttacggtaacgcaacgttgctggcgtccgacatggtgtttggtatcggtaaccgttttgctaaccgtcataccggttcggtagagaaatacaccgaagggcgcaaaatcgttcatatcgatattgagccgacgcaaattggccgcgtgctgtgtccggatctcggcattgtctctgatgctaaagcggcgctgacactgctggttgaagtggcgcaggagatgcaaaaagcgggtcgtctgccgtgtcgtaaagaatgggtcgccgattgccagcagcgcaaacgcactttgctgcgcaaaacccatttcgacaacgtgccggtgaaaccgcagcgcgtgtatgaagagatgaacaaagcctttggtcgcgatgtttgttatgtcaccaccattggcctgtcacaaatcgctgcggcacaaatgctgcatgtctttaaagaccgccactggatcaactgtggtcaggctggtccgttaggctggacgattccggcggcgctgggggtttgtgccgctgatccgaaacgcaatgtggtggcgatttccggtgacttcgacttccagttcctgattgaagagttagccgttggcgcgcagttcaacattccgtacatccatgtgctggtgaataacgcctatctcggcctgattcgtcagtcacaacgcgcctttgacatggactactgcgtgcaactcgctttcgagaatatcaactccagcgaagtgaacggttacggcgtcgaccacgtaaaagtagcggaaggtttaggttgtaaagctattcgcgtcttcaaaccggaagatattgcaccggcctttgaacaggcgaaagccttaatggcgcaatatcgggtaccggtagtcgtggaagttattctcgagcgtgtgacaaatatttcgatgggcagcgaactggataacgtcatggaatttgaagatatcgccgataacgcagcggatgcaccgactgaaacctgcttcatgcactatgaataagggagataaataatgttacgtttctctgctaatttatcgatgttatttggtgaatatgattttctcgcccgttttgagaaagctgcgcagtgtggttttcgcggcgttgaatttatgtttccttatgactacgacattgaagaattaaaacaggtgctggcgagtaataaactcgaacatacgctgcacaatttaccggcgggtgactgggcggcgggggagcgcggtattgcctgtattcctggccgtgaagaagagtttcgggatggcgtagcagcagcgattcgttatgcccgtgcgctgggtaataaaaaaattaactgtctggtcggtaaaacgccggctggtttcagcagtgaacagattcacgcaacgcttgtagaaaacctgcgttatgccgcgaatatgctgatgaaagaagatattttattactgattgaacctattaaccattttgatattcctggtttccatctcaccggaactcggcaggcgctgaaattgattgatgatgttggttgctgcaatntgaaaattcagtatgacatttatcacatgcagcggatggaaggtgaattaaccaacactatgacgcaatgggctgataaaattggtcacctgcaaattgccgataatccgcatcgcggcgaaccggggaccggagaaattaattatgattatctctttaaggtaatcgaaaattctgactacaacggttgggttgggtgtgaatataaaccccaaaccaccacggaagccggtttacgctggatggatccgtaccgttaaaacgtaacgctattcagacaatgcttttttaggctgctaagttggcaggggatcgtgttgtctgaattcaggaatagcgacatttaaaaagaggttaattatgaaactgggatttattggcttaggcattatgggtactccgatggccattaatctggcgcgtgccggtcatcaattacatgtcacgaccattggaccggttgctgatgaattactgtcactcggtgctgttaatgtcgacaccgcgcgccaggtaacggaagcagcggacatcatttttattatggtgccggacacacctcaggttgaagaagttctgtttggtgaaaatggttgtaccaaagcctcgctgaagggcaaaaccattgttgatatgagctccatttcaccgattgaaactaaacgtttcgctcgtcaggtgaatgaactgggtggtgattatctcgatgcgccagtctccggcggcgaaatcggcgcgcgtgaagggacgttgtcaattatggttggcggtgacgaagcggtatttgaacgtgttaaaccgctgtttgaactgctcggtaaaaatatcacccttgtgggcggtaacggcgacggtcaaacctgcaaagtggcaaatcagattatcgtagcgctcaatattgaagcggtctctgaagctctgctgtttgcttcaaaagccggtgcagacccggtacgtgtgcgccaggcgctgatgggcggctttgcttcctcacgtattctggaagttcacggtgagcgcatgattaaacgcacctttaatccaggtttcaaaattgcgctgcaccagaaagatctcaacctggcactgcaaagtgcgaaggcactggctctgaacctgccaaacactgcgacctgccaggagttatttaatacctgcncggcaaacggtggcagccagttggatcactctgcgttagtgcaggcgctggaattaatggctaaccataaactggcctgatacccgcaataaaaatggccgatatcaaaaaatgaatcggccagcaatattaaaaaagaaagcagccaaagatgttgcttcagtnttaaaaataanatttttattttattttttcctcatagctagattaaaacaacgttattcgatacgtgaaattaagagggatttatggaacatcagagaaaactattccagcaacgcggctatagcgaagatctattgccgaaaacgcaaagccagcggacctggaaaacatttaactattttaccttatggatgggttcggttcataacgttcccaattatgtgatggtcggcggcttttttattctcggcttgtctacctttagtattatgctggcaattatcctcagcgcctttttcattgccgcggtaatggtattaaacggcgctgcgggcagtaaatacggcgtaccgtttgccatgatcctgcgtgcttcttacggcgtacgtggcgcactgtttcccggattattaagaggcggtattgctgccattatgtggtttggcctgcaatgttacgcggggtcactggcctgcttgattctgattggcaaaatctggccgggatttttgactctcggtggtgatttcactctgttaggcctttctctaccgggcttaattactttcttactcttctggctggtcaacgttggtataggttttggcggtggcaaagttttaaataaattcactgccattcttaacccgtgcatctatatcgttttcggcggtatggcgatttgggcgatttcgctggtcgggctcggtccaatctttgactacattccgagcggtattcagaaagcagaaaacagtggattcttgttcctggtggtgattaacgcggtagttgcggtctgggcggcaccggcggtgagcgcatccgactttacgcaaaacgcccactcgtttcgtgagcaagcgctggggcaaacgctgggtttagttgtggcctatattctgtttgcggtcgcgggggtatgtattattgccggagccagtattcattacggcgctgatacctggaacgtgctggatattgttcagcgttgggacagcctgtttgcctcgttctttgcggtactggttattctgatgacgactatctccactaacgccactggtaatattattccggctggttatcagattgctgccattgcaccgacaaaactgacctataaaaacggcgtactgattgccagtattatcagcctgctgatctgcccgtggaaattaatggaaaatcaggacagtatttatctgttcctcgatattatcggcggaatgcttggtccggtaattggtgtcatgatggcgcattattttgtggtgatgcgtgggcaaattaatcttgatgaactgtacaccgcacctggcgattataaatattacgataacggttttaacctcaccgcgttttcagtaactctggtggccgttattttatctcttggcggtaagtttattcccttaatggaaccgttatcgcgtgtttcatggtttgtcggcgtcatcgtcgcctttgcttgagttaaaaaccaatctgtattttacaaggagtttgttatgtcttttgatttaatcattaaaannnncaccgttattttagaaaacgaagctcgcgttgtagatatcgccgttaaaggcggcaaaattgctgctatcggtcaggatctgggcgatgcaaaagaagttatggatgcgtctggtctggtggtttcgccgggcatggttgatgcgcacacccatatttctgaaccgggtcgtagccactgggaaggttatgaaaccggtactcgcgcngcggcaaaaggtggtatcaccaccatgatcgaaatgccgctcaaccagctgcctgcaacggttgaccgcgcttcaattgaactgaagttcgatgccgctaaaggcaagctgactatcgatgcggcacaactcggtggcctggtgtcttacaacatcgaccgtctgcatgagctggatgaagtgggcgttgtcggcttcaaatgcttcgttgcgacctgtggcgatcgcggtatcgacaacgacttccgtgatgtaaacgactggcagttcttcaaaggtgcgcagaagctgggcgaactggggcagccggtgctggtgcactgcgaaaacgcgctgatctgtgacgcactgggcgaagaagcgaaacgtgaaggtcgcgtaactgcccatgactatgtggcttcgcgtccggtatttaccgaagtggaagcgattcgccgcgtgctgtatctggcgaaagttgccggttgccgtctgcacgtttgccatatcagcagcccggaaggcgttgaagaagtgactcgtgcacgtcaggaaggtcaggacgttacttgtgaatcctgcccgcattacttcgtactggataccgatcagttcgaagaaatcggtactctggcgaagtgttcaccgccgatccgcgatctggaaaaccagaaaggcatgtgggaaaaactgtttaacggtgaaatcgaccgcctggtttccgaccactcaccatgccctccggaaatgaaagccggcaacatcatggaagcatggggcggtattgccggtctgcaaaactgtatggacgtgatgttcgatgaagcggtacagaaacgcggaatgtctctgccaatgttcggcaaattaatggcgactaacgcagcagatatttttggtctgcagcaaaaaggccgtatcgccccaggaaaagatgccgacttcgtcttcattcagccgaatagcagctatgttcttaccaatgacgatctggaatatcgccacaaagtcagcccgtatgttggccgtaccattggcgcgcgtatcacgaaaaccatcttacgtggtgatgtgatttacgacatcgaacagggcttccctgttgcgccgaaaggtcaatttatccttaaacatcagcagtaatctggcccctgcaatgcccgtccttgcggcgggcattctccggttaaggtgtgtttatgttcaattttgcagttagcagcgaaagcctgttatcaggatttcagtggtttttctttattttttgcaacacggttgtggttcctcctacgctactttctgcttttcagttgccgcaaagtagcctgcttacgctcacgcaatatgcttttcttgctaccgcactggcctgcttcgctcaggcgttttgcggtcatcgtcgcgctattatggaagggccggggggcctgtggtggggaaccatcctaactatcacccttggcgaagcatcgcgcgggacaccgatcaacgatatcgctaccagcctggcggtggggattgcactctccggcgtgctgacgatgttgattggttttagcggattaggtcatcgcctggcgcggttatttacgccgtcggtgatggtcttgtttatgttgatgctgggcgcgcagctgaccactatctttttcaaaggtatgctcgggctgccgtttggcatagccgacccgaattntaaaattcagttaccgccgttcgcgctctcggtggcggtgatgtgcctggtactggcgatgattatctttctgccgcaacgttttgcccgttatggcctgctggtcggcaccataaccggctggttgttgtggtacttttgctttccttcttcgcattcgctctccggtgagttgcactggcagtggttcccgctcggcagtggcggtgctttgtcgccggggattattctgacggcggtgattacaggtctggtgaatatcagcaatacctacggtgcgattcggggcacggatgttttttatccgcagcagggngcggggaatacgcgttatcgtcgtagctttgtggcgaccggatttatgacactgataaccgtgccgctggcagtaattccattttcaccgtttgtttcatccattggtttattaacccagactggcgattacacgcggcgttcgtttatttatggcagcgttatttgcctgctggtggcgctggttccggcactcacgcgactgttttgcagtatccctttacccgtgagtagtgcggtcatgctggtttcttatctacctttactcttttccgcgctggtgtttagccagcaaataacgtttaccgctcgcaatatttatcgactcgcattgccgttatttgtcggcatatttttaatggcattaccgcctgtgtatctgcaagaccttccattaacgcttcgtcctctgctcagtaacggcttattggtcgggattttactggctgttcttatggataaccttattccgtgggaacgcatcgaataatttgttgaaaaaggattgataatgaagattgtcattgcgccagactcttttaaagagagcttaagtgcagaaaaatgttgtcaggcaattaaagccgggttttcgaccctctttcccgatgcgaactatatctgtttgccgatagcggatggcggcgaagggacggtggatgcgatggtcgccgcgacgggcggcaacatcgtgacgcttgaagtctgcgggccgatgggcgaaaaagtgaatgctttttatggcattaccggcgacgggaaaacggcggtgattgagatggcggcagcaagtggcctgatgctggtcgcgcctgaaaagcgtaatccgttgctggcctccagttttggtacgggggagttaattcgtcatgcgctggataacggcattcgccatattattctcggcattggcggcagtgcgacggtcgacggcggtatgggcatggcgcaggcgctcggtgtgcgtttccttgatgccgacggtcaggtgctggtggctaacggcggcaatttagcgcgcgtggcaagcattgagatggaggaatgcgatccgcgtctggcgaactgccatattgaagtagcatgtgacgttgataacccgctggtaggggcacgcggcgcggcggcggtgtttggcccgcaaaaaggggcaacgccggagatggtcgaagaacttgaacaggggctgcaaaattacgcccgtgttttacaacagcaaactgaaattaatgtctgccagatggcgggcggtggcgctgcgggcggtatggggattgcggcggcggtattcctcaatgcggatattaaaccgggtattgagattgtactgcgggcggtcaacctggagcaggcggtgcagggggcagcactggtgatcaccggggaagggcgcattgactcgcaaacggcaggcggtaaagcgccgctgggcgttgcgtcggtggcgaagcagtttaatgtaccggtgattgggattgctggcgtattgggtgatggcgtggaagtggtgcaccagtacggcattgatgcggtattcagcattttgccacgtctggcacctttagccgaagtgctcgccagcggtgaaaccaatctcttcaacagcgcgcgaaatattgcctgcgccattaaaataggtcagggaattaaaaactgacccttacctttaaagnggatgcgatttatatcgcataagagtgcagtactcatgccggatgcggcatgagtaccatatccttcctgaaaatcgcgcaaattctatatattgcagagatcatgtaggcctgataagcgaagcgcatcaggctatgttgcaaaaaaagccacggtataaaccgtggcaaaatccaacatagctaaaaataatcaggcgagtggtatgacttaaatctctacgtcgcggttacaatctttcgagtaaatatagctgaacgcttcaccacgccctacgccataaccagcctgtaaagaataagcgcccataaagatgtaatcgccttttttcaccgggatccagttattgtcgaggttataaaccccctgaccggaaagaatataggcaccgtgttcctgaacatgtgtttcgatataaccgtggctggcacctggtgcaaaagaaaggatatgcatgttcatatcaaaacctaactctttgggcaggaaatccagcaggatcacatcatccataccttcatagtgaatgcgttccagttcgctggcattgccagaaaccagccacggtgcatagccttctaccggaacatagcggcncttatataaaaagatttggctgtcttcggcctgggcgttaacaaacgtcattaaggagccaggcgggcaataaagatagccaccttcncttaaggaaaatgttttgccttcggctttggcagtgatatttccagagatcacatacaggaacgtttcaatgccttcgccaccgaagccctgttggttgccgccgttttgatgcagtgtgaccagataatcaacaaaagaggcacccagctttggcgtggagaggattgtcgcgtcacaattttcaaagcccggaataatattttttaccagaccgtctggtgttaacagtgcgaaattaccgtgtttcacaatcgcacggttagccagtaaatcatcgcggtaaccggtgacgttatttaaatatcccatttatgactccttatttctgccaggcaagttgataaagcatgagtgccaacgttttgaccccttcggcaaggtcggtaatattggtgcgttccgccgggttatggctgatcccgttgatgctggggataaaaatcatgcaggttggtacgcgaggcgcgaaaatttgcgcgtcgtgcccggcaccactgtgcatcacccggtaattcagtttttcactttcacacaattctgtcagggtggcgaccaggtccttattcatcggcacgggttcttcgtccatccataaatcgatatcaatacgaatgtccatttcatcgcaaatcgcccgcatgtcgttttctaactgttgggtgaaatcacgcagcacggcggcgtcggtatgacgacaatcaatggtgaacgtggttttacccggcaccacattcaccgtattcgggcgcggctctactttcccaaaggtcagaaccagcggatcgcccatctttttcgctttttcgatcgactgatggcaaatgcgactgaaagcgtaaaccgtatcacgacgataacccatcggcgtggtgcctgcatggtttgattcgccgttcagcgtcaccgtatagcgacgttgcccgacaattgcattcaccacgccaattgattgcccattactttccagcacacagccctgttcgatatgcagttcgacaaaggctttaatatcctgacgcggagttagcggggcgtccggcagagtaaatccgcaagccttcatcgcatcgacaaaactatttcctttggcatcacagatattccgcacgtcgtcaggattcgccagcccaaagatatttttactgccccagaaaacatacgggaagcggctgccttcttcttccgccatcgccaccacttcaaccgtacgcagcggtgcgccgtattgagttttcagccagtcaattgccagccgcgccgnnnncgcnncgaattgcccgtcgaggttaccgccgttaaccacggtatcgatatgcgaaccgctcagaatcacttcctgtggatattcggtgccactcaggcgaccgtataaattccccacttcatcgaaacgtgtttccagcccacttgcggccattctttttttaaattgctgctgggtttccagccattccggcgaataaagtaaacgggtcatcccacccgctgggtcagcgccaaaagaggaaagccagggcagcgcttcttctatggtttgacgaaaatgtgtaatcataagaaagtcctgtctcaatnnnnnnnnnnnaaagggatttttcgtttcgtatgacgtgttataaagcgcgtcggaaattaaatactggtaaatatcatcaacaatttcgatgccttcgacggcggcttggcgttgtttaatatcctgatcctgtccgggataataaacctgattaaaaccgggcgcgggggtaatggcatttaattcgcgcatggtctggctaagatgttgacggaataattcgctggaggagaaaaagttcgggttaataactacatgtaattgccccaaattacgcccggcgtgtaaatcgtcatacatcgaactaacctgtcgcccgaacggtaagccgagtaagacgcctgagaggacgtcaatcatcatcatcaggccataccctttcggcccggctgcggggagcagagcatgtaccgcgaacggatcggttgttggtgcaccgtttttatcgaccgcccaggtatccgggatagacatattacgcgagcgggcgtcgaggacttttccccatgcctgtacggtagtcgccatatcaaaggtaaggatctcgtcgccttctcccggcgcggcaaaggccagtgggttagtaccgtagtaaatttccgcgccgccaaacggcaccaccatcggatcggactggcacatcgaaatgccaattaatccggcgcgggctgcctgctgcacaaaataagagattgcgccgctgtgacccatccggctgataccgaccaccgcaacgccattttgctgggcggttttgatggcatgttccatacccattttcgccgcgacctgtccggcggcattgtcggcatgtaaaattgccgagcacggcccggtttcctcaagacgaaactccggttcgcggttggtgccgccttttgaaatgcgttccgcgtagtattccacgcgcaccgcgccatgagagtggatccctctggcatcggcataaaccaatacttcagccacggttgcagcgtgctcacgttttaacccagcctggcagagtttattctcaattagctggtggagtgtttcccgactgattttcatctgtcttcctttttaacgacggtgtgaagcatgactgcaattaacatacagggaaaatatctggattatgtgatccagacaggcaaaaaaatatagttagaatttatttgataatccgctcgcttttaacctggtttttaaaacaancnnnnnnnntaaaaaataacacgtaatagcatggcggttatttgaattcttttgttaataatccctgtgtgatattcatcaccttatttactcgttgtcatcgataccgtaatcgccacattaacactgctcgtgcaattgccatgggtgcaatttttaaggagttgttatgatccacgcctttattaaaaaagggtgttttcaggattcggtcagtttaatgattatttcacgaaaactcagcgaatcagaaaatgttgatgatgtttccgtaatgatgggtacgcccgccaataaagcgttattagataccacaggtttctggcatgacgattttaataacgccacgccgaacgatatttgcgtggcaattcgtagcgaagcggcggatgcggggatcgcgcaggcgattatgcagcagcttgaagaggcgctaaaacaactggcgcaggggtcaggcagcagccaggcgttgacgcaggtgcgtcgctgggacagtgcctgtcagaaattacccgatgccaatctggcgctgatttcagtggctggcgagtatgcggcggagctggcgaatcaggcgctggatcgcaacctcaacgtgatgatgttctccgataacgtcacgctggaagatgaaatccaacttaaaacccnnnngcgggaaaaaggcttgctggtgatggggccggactgcggtacgtcgatgattgccggcacgccgctggcttttgctaacgtgatgccggaaggcaacattggcgtcattggcgcttccggtaccgggattcaggagctgtgctcgcagattgcgctggcaggggagggaattactcacgcgattggccttggcggccgcgacctcagccgtgaagtgggcggcatcagtgcgctgacggcgctggaaatgctcagtgcagacgagaaaagcgaagtgctggcatttgtttcaaaaccacctgccgaagcggtgcgtctgaaaattgttaatgccatgaaagcaaccggcaaaccgacggtggcgctgtttttaggttataccccggcggtggcccgcgacgagaatgtctggtttgcctcctcgctggatgaggccgcacgcctggcttgcctgctttcacgcgttacggcgcgacgtaacgcgataatgcctgccagcagcggatttatttgcggtttgtataccggcggtacgctggctgccgaagcggcgggattacttgccggacaccttggcgtggaagccgatgatgcccatcatcacggcatgatgctggacgccgatggccaccagattattgacctcggcgatgatttctacaccgtcgggcgtccccatccgatgatcgacccaaccttacgcaaccagttaattaccgatctcggcgctaaaccgcaagtgcgtgtgctgctgcttgatgtcgtgattggcttcggtgcgaccgccgatcctgccgcctcgctggtaagcgcctggcaaaaagcctgtgctgcgcgttcagacaatcaaccactgtatgccattgccacggtgacaggcactgaacgtgacccgcaatgccgctcgcagcaaatcgccacgctggaagatgcggggattgcggtcgtgagttcgctaccggaagccaccttgctggcggcagcgttaattcatccgctctcgcctgccgcacagcaacacacaccgtcattactggaaaacgtcgccgtgattaacatcggattacgcagttttgcgctggagctacaaagcgccagcaaaccggttgtgcattaccaatggtcgccagnnnnnnnnnnnnnnaaaaaactggctcgtttattagaacgtttgcaataaggggttctcatgtttacatcagtggcgcaagccaatgctgcggttatcgaacaaattcgtcgcgctcgtccacactggctggatgtgcaaccggcttcttcacttatcagcgaactaaacgagggcaaaacactgcttcacgccgggccgccaatgcgctggcaggagatgaccggacccatgaaaggggcgtgcgtgggcgcatgtctgttcgaaggttgggcgaaagatgaagcgcaggcgctggcaatactggagcagggggaagtgaacttcattccttgtcaccatgtgaatgccgtcgggccaatgggcggtattacttctgccagtatgccgatgctggtggtcgagaacgtgaccgacggcaaccgggcgtactgcaacctcaacgaaggtatcggcaaagtgatgcgttttggcgcttacggcgaagatgtcctgactcgccatcgctggatgcgcgatgtgttaatgccagtattaagcgcggcgctggggcgcatggagcgcggtatcgatcttactgcgatgatggcgcagggcattacgatgggcgatgagttccatcaacgcaatattgcttcctcagcactgttaatgcgtgcgctggccccacaaattgctcgcctcgatcatgataaacagcacatcgcggaagtgatggatttcctcagcgtgaccgatcagttcttcctcaacctcgcgatggcttactgcaaggcggcgatggatgctggcgcgatgatccgcgcaggcagcatcgtcacggcaatgacccgcaacggcaatatgttcgggattcgggtaagcgggctgggcgaacgctggtttactgcgcctgtaaacactccgcaaggtctgtttttcaccggcttctcgcaggagcaggcgaacccggatatgggcgatagcgcgattaccgaaacctttggtatcggaggtgcggcaatgatcgcagcgcctggcgtaacgcgctttgtcggtgcgggtggcatggaagcggccagggctgtatctgaagagatggcggaaatttaccttgaacgcaatatgcagttgcagatcccaagctgggattttcagggcgcgtgcctgggactggacattcgtcgcgtggtagaaaccggcattacgccactcatcaataccggtatcgcccataaagaggcggggatcgggcagattggcgcaggcaccgtgcgggcaccgctggcgtgctttgaacaggcgctggaagcactggctgaaagcatggggattggttgaggaacgcgtaatgacgatcatccatcctctgcttgccagtagtagcgcaccgaattatcgccagtcctggcggttagcgggagtgtggcggcgggcgattaacctgatgacggaaagcggcgaactgttaacgctgcatcgtcagggtagtggtttcggccccggaggatgggtgcttcgccgtgcgcaattcgatgcgttatgcggtggattatgcggcaatgaacgaccacaggttgtggctcaagggattcgcctcgggcgtttcacggttaaacagccacagcgttattgtttgctgcgtattacgccgcctgcgcatcctcaaccacttgcagctgcatggatgcaacgcgcggaggaaaccgggcttttcgggccactggcgttggcggcaagcgatccgctgcctgctgagttacgccagtttcgtcactgttttcaggccgcgctcaatggcgttaagaccgactggcggcactggctgggtaaaggccccggattaacgccaagtcatgatgacacgctgagcggaatgctgctggcggcctggtattatggtgctttagatgcgcgctccggtcgtccgttttttgcctgttccgacaatctgcaactcgttaccacagcggtgagcgtcagttatttacgttatgccgcgcaaggatatttcgcctcgccactcctgcactttgttcatgctctgagttgcccgaaacgtaccgctgttgcgattgattcgctgctggcgctggggcatacgtcaggggcagatacactgctggggttctggcttggccaacaattattacaaggaaaaccatgaaaacactggttgtagctcttgggggcaacgccttactccagcgcggtgaggcgctgacggcagaaaatcaatatcgcaatatcgccagtgctgtacccgcgctggcncgnntggcccgttcttatcggctggcgattgttcacggcaacgggccgcaggtggggctgctggcattgcagaatctggcgtggaaagaggtagaaccgtatccgctggatgtgctggtggcagaaagtcaggggatgattggctatatgctggcgcagagtttgagcgcacagccgcagatgccgcctgtcacgacggtgcggacgcgcattgaagtttcgcctgatgatccggcgtttttgcagccagagaaatttattggtccggtttatcagccagaagaacaagaggcactggaagcggcttacggctggcagatgaaacgtgatggtaaatatttgcgccgggtggtggcgtctccgcaaccgcgtaaaattctcgacagcgaagccatcgagttgttgctcaaagaggggcatgtggtgatttgcagtggcggcggcggtgtgcctgtgacggatgacggagcagggagtgaagcagtgattgataaagatctcgccgctgcgttgctcgccgagcaaattaacgccgatggactggtgatcctcaccgatgctgatgcggtatatgaaaactggggaacgccgcagcaacgtgccattcgccatgccacaccggatgagttagcgccatttgccaaagccgatggttcgatggggccgaaggtaacggcggtgagtggttatgtcagaagccgtggtaaacccgcgtggattggggcgttatcgcgaattgaagagacgctggcgggcgaagcggggacctgtatttcgctgtagtgatgagagcatccggcaatcggcgcaccatgcctgatgcgacgcttgacgcgtcttatcaggcctacaatgggtaccggatcggtgtaggccggataaggcgttcacgccgcatccggcaatcaaatgagcaccaggttaactgaacttactctgcgcccacatcacgccgctggcatattccggcggcagcagcgggatcaaggcttccagcgtcgcggacagacgcgatgtgtcgctgtcggtcaaattcagatgccccactttacggcccggacggacttctttgtcgtaccagtgcagatgcaccagcggcagtttcagccagtcataattcacatcgctaccaatcagattgatcatcaccgacggattattcaccactggttgcggtaacggcagatcggtaatcgcccgcagatgtagctcaaactggctgatgctggcaccgttttgtgtccagtgaccgctgttatgcacacgcggtgccagttcgttgatcagcagaccttgcggggtgacaaaacactccatcgccatcacgcccacatagcccagctcctgcataatcgccgacagcatctcttcggcttgcgcttgctgctgcgcattggcctgcggaaaagcgacgctggtgcgcaaaataccgtcctgatgcaggttatgcgtcagcggataaaacacggtgctgccatcaaagcagcgcgcgccaaccagcgacacttcaccagagaagtttatgccctgctcgacaatacattcgccgtagcattcagccggtaactgctcggtttcatcggcgcgtaaacgccattgaccgcgtccgtcatagccaccagtgcgacgcttaacaatcgccagctcacctaaacgatcaaacaccgcaggccactcgctgcgttcggcaagtaactgccacggtgcagtcggcaggtggagcttatcgaaaagctgcttctgagtcagacggtcagcaataatcgggaacacatcgcggttcacaaaggccggatggcgcgccagctcgcgggttaatgctgtttccggccagcgttcgatctcagcggtaatcacgctttgttgaaaaggcaccgccgccggttcagcgtccagcccgaccggccagacagcaatgcctaacggttcgcctgcctgacgcagcatacggcctaactgcccgttaccgaggacgcaaacctgtttcatgccgcacctcgcgggtccgggttttccagcacttcatcagtttgtgctttgcgccagtcattcagacgctggtgcagttctttatcatgagtcgcaagaatttgtgctgccagtaatgccgcgtttgccgcgccagctttaccaatcgccagcgtacccaccggaatgccgcgtggcatttgtacgatggagtagaggctatcgacaccgctcagtgcggcgctctgtactggcacgcccagcactggcaccagcgttttggcggcaatcatgcctggcaggtgcgctgcgccgcctgcgcccgcaataatcacctgataaccgttctcttcggcactttcggcgaagctgaatagtttatcgggggtgcggtgagcagaaaccacttcaacgtggtgcgggacattcaggatttcgaagatttcggcggcgaactgcatggtagcccagtcgcttttggaccccatcacgatggcgacacgcgccggattattgcgggaagacatgcgtcttaaaactcctgtggtgcacaactctcggctttagagggcacagagaatagcacggaaagagagcaaggaaaacggttgcgtggctgtgaaatcagcaaagttgcgggttttttaaaacggaaaatgaatcagctcaacgtcatccgccgtgactttcaccatcgaaccttccgtatgccaggcacccagtaccacgcgaaaagcaggttgctgattggcgataagttcatgcaccgccgggcgatgggtatgcccgtggatcagccattgcacctgatgtttttccatcgcactgactaccgcgttttggttaacgtccatgatcgccagcgatttactgctgttggcttctttactgttcgcgcgcattcgcacggcaatgcgtttgcncacaaacaacggcagagcgaggaatagcgtttgcagccagggtttgtggactttggtgcgaaaagcctgataacccgcgtcatcggtgcacagcgtgtcgccatgcataatcagcacccgacgaccataaagttcgagcactttttcttccggcaataacgtcatgccactttcacgggcaaagcgtttgccgagcagaaaatcacggttgccatgaatgaaataacagggaacgccggaatcggacaccgctttgatcgctgccgccatctggcgatggagtgggttgggatcgtcgtcgccaatccatgcttcaaacagatcgccaagaatatacagcgcgtcggccttgcgggcttctcccgctaaaaaacgcagaaaaccggcggtgatcgccggttcttccacgcagagatgaagatctgcaataaagagtgtcgccacgattactcgctaacggtcacgctttcaatgataacgtcttcttttggcacgtcctggtgcataccgctacgaccggttgcaacacctttgattttgtctaccacgtccatgccttcaaccacttcagcaaacacgcagtagccccaaccttgcaggctttcgccagagaagttcaggaagtcgttatcaaccacgttgatgaagaactgtgcagttgcagagtgcggagcctgagtacgggccattgccagcgtaccacgggtatttttcaggccgttgttggcttcgtttttgatcggttctttggtggctttttgtttcatgcccggttcaaaaccgccgccctgaatcataaagccgttgataacacggtggaaaatggtgttgttgtaaaaaccttcgcggcagtagtccaggaagtttttaactgtttcaggtgctttatcgtcaaaagttttgatgacaatatcgccgtgattggtgtggaaagtaaccatttttgcatcctgttccgtttgattggtgcttcaacccagttcgggtcatatatagggtggtgttatagcataaccgcacgatcggatcatcacgcaatgtatgctgattcgcgcgggaaatatgggtattatacgcaactcaattacccacacatgtctaaacggaatcttcgatgctaaaaatcttcaatactctgacacgccaaaaagaggaatttaagcctattcacgccggggaagtcggcatgtacgtgtgtggaatcaccgtttacgatctctgtcatatcggtcacgggcgtacctttgttgcttttgacgtggttgcgcgctatctgcgtttcctcggctataagctgaagtatgtgcgcaacattaccgatatcgacgacaaaatcatcaaacgcgccaatgaaaatggcgaaagctttgtggcgctggtggatcgcatgatcgccgaaatgcacaaagattttgatgcgttgaacattctgcgcccggatatggagccgcgcgcgacgcaccatatcgcagaaattattgaactcactgaacaactgatcgccaaaggtcacgcttatgtggcggacaacggcgacgtgatgttcgacgtcccgaccgatccaacttatggcgtgctgtcgcgtcaggatctcgaccagctgcaggcaggcgcgcgcgttgacgtggtcgacgacaaacgcaacccaatggacttcgttctgtggaagatgtcgaaagagggcgaaccgagctggccgtctccgtggggcgcgggtcgtcctggctggcacattgaatgttcggcaatgaactgcaagcagctgggtaaccactttgatatccacggcggcggttcagacctgatgttcccgcaccacgaaaacgaaatcgcgcagtccacctgtgcccatgatggtcagtatgtgaactactggatgcactcggggatggtgatggttgaccgcgagaagatgtccaaatcgctgggtaacttctttaccgtgcgcgatgtgctgaaatactacgacgcggaaaccgtgcgttacttcctgatgtcgggccactatcgcagccagctgaactatagcgaagagaacctgaagcaggcgcgtgcggcgctggagcgtctctacactgcgctgcgcggcacagataaaaccgttgcgcctgccggtggcgaagcgtttgaagcgcgctttattgaagcgatggacgacgatttcaacaccccggaagcctattccgtgctgtttgatatggcgcgtgaagtaaaccgtctgaaagtagaagatatggcagcggcgaatgcaatggcatctcacctgcgtaaactttccgccgtattgggcctgctggagcaagaaccggaagcgttcctgcaaagcggcgcgcaggcagacgacagcgaagtggctgagattgaagcgttaattcaacagcgtctggatgcccgtaaagcgaaagactgggcggcggcagatgcggcgcgtgaccgtcttaatgagatggggatcgtgctggaagatggcccgcaagggaccacttggcgtcgtaagtaattgcgctattgccggatgcgagttttcgcatccggttatcgtctgcgccaccacaacattcccatcagtagcatccccggcaaccacacccacatcaattcagaaataatcacctgatgcccgtacgctgtggtgtaacgagacaatgcaaacggcgcgactttaatcacctgccagggagcgaaaaagcgttcatctgaccacggccacagccagccaacccctttaccgccagtggttaccgaatccagcaagctgtgcgatagcaacgagacggttaaaaacagccagcagcgaatcagcccagccctgaaccatcgacgtccaatcagcacacataacagcgggacaacaaacgcaaacaccagcgaatgggtaaacccgcgatgaccaaaaacattgccgtaagcaacgccaaaattaaacgacaagacgtcggcatcgggcagcatcgccaggatgattccggcaaataacaggcgcggagggatgactttcgaacccaaccctaaaccaatgcataggggaacggcggcgtgcgtaataacggttggcatgatggtcgcttcggcaaaatgtcgatgctatcagcatggatgaacggggcgtagagggcaaaagtctgaaaagagaaccggcctgttgatacaggccgggaaagggatcaggcaacaacctgtacgctgtgacctgcaaaactcactgtctgcccggcgacgattttgcagcgtttgcgcgtttcaaccgcgccgtcgactttcacctggccttcggcaatcgcgattttcgcctgcgcgccgctttcgctccagccttccagtttcagcaagtcgcacagctcaacgtgcggatgtttacctaaagaaaatgtcgccatgttactcaccctgtggatcatgatattcaacgcacgcctgtagcgtgttttcaatcagcgtggcaaccgtcatcgggccaacgccgcccggaacaggcgtaatgtatgaggcgcgtttagccgcgtcttcaaacacgacgtcgcccacaactttgccattttccanacggttgatgccgacatcaatcacaattgcgccttctttgatccagtcaccaggaataaagcccggcttgccgacggcaacnatcaacagatcggcattttctacgtggtgacgcanatttttagtgaaacggtgagtcacggtggtggtgcaacctgcgagcaacagttccatgctcatcgggcggccaacgatattcgatgcgccaatcaccacggcgttgaggccgaaggtatcaatgttgtaacgctcaagcagcgtgacaataccgcgcggggtgcagggacgcagacgcggcgcgcgctggcacagacgaccgacgttataaggatggaaaccgtctacgtctttgtccgggtgtatacgttccagcactttgacgttatcaatacccgccggtaacggcagttgaaccagaatgccatcgatggtgttgtcggcattcagcgcatcgataagctccagcagctccgcttcgctggtggtttccgggaggtcataagagcgggagacgaacccgacttcttcacaagccttacgtttgcttgcgacataaatttgcgatgcagggttactacccaccagcacaacggccagtcctggtgcccgcagtccggctgcaatacgcgcctgaactttttgagcaacttcagagcgcacctgctgcgcaatcgttttaccgtcaataatctttgctgccatcagagagaggattccatctgttacgtaggtcgaaggggatgcgcctattttgtcagaagcggggcgcgctgtcaggtttcgtttcagatttatcgcgtgaagcgacctcttgcgaaggttaggcgcactgtcgctgagattgaaagcttcatttttcgtccatgatggcgttgtaaatctggaactgatttatttccttgtttaaggattaagataatttaagaaatacctgacaatataaaaagaatnttcagcctggtaatttaccgcttcaggtctatatttgtgttgaatatattttgcgcggaagtattcatctaacggggctctctnttttttagaatagagtgcatattttcaattaagacattcttagaggataaaaaggaatttactactatcagtgtcttaaataaagtaatcggttatatacggatgtggagtcgataaatgagattgaaggaatatatatgaaattaagatttatttcgtctgcgctggctgccgcactattcgccgctacgggtagttatgctgccgttgtagatggcggtacaattcactttgaaggtgaactggtgaatgctgcctgttcagtgaatactgactcggcagaccaggttgtcacactcggtcaatatcgtaccgatattttcaatgctgttggtaatacctctgcattaattccattcaccattcagttgaacgactgcgatcctgttgttgccgctaatgctgccgttgcattttctggtcaggctgatgcaatcaatgataatttattggccattgcatccagtaccaatacaacaacagcaacgggtgtcggtattgaaatacttgataatacatccgcaattctcaaacctgatgggaatagcttctcaaccaaccagaacttgatccccgggaccaacgttcttcatttttctgcacgttataaaggcaccggtacaagtgcatcagcagggcaagcaaatgctgacgcgacttttattatgagatacgaataatcaaaaccacgttgttttgaattatatatcacgtcttataacaaagtaatgtaccggttgtctgaagcggtatggtggcaatgtaaatcgaaatcatgttcactttgtatcatgccgctttattaaatgaaaagggaatgatgtgttgtaagaaaccaaagcaatcatttctttatatttcttatttttgcnnnnaggaatacacaaggcgtattaactatgatgactaaaataaagttattgatgctcattatattttatttaatcatttcggccagcgtccatgctgccggagggatcgcattaggtgccacgcgtattatttatcccgctgatgctaaacagactgcggtatggattagaaatagccataccaatgagcgttttctggtcaattcgtggattgaaaacagcagcggtgtaaaagaaaagtcattcatcattacaccgccactatttgttagtgaacccaaaagcgaaaatactttgcgtattatttacaccggtccaccgctggcagcagatcgtgagtctctgttctggatgaatgttaagacgattccttcggtagataaaaatgcattgaacggcaggaatgttttgcaactggcgattttatcgctcatgaagttatttctccgtccaattcaactacaagaattacccgcagaagcgccggatacactcaagttttcgcgatccggtaactatatcaatgttcataatccatcacctttttatgtcaccctggttaacttacaagtgggcagccaaaagttggggaatgctatggctgcacccagagttaattcacaaattcccttaccctcaggagtgcagggaaagctgaaatnnnngnncgttaatgattatggttcagtaaccccggtcagagaagtgaacttaaactaaccgaatcatctgacaatatcagagctaattatgaaaatacccactactacggatattccgcagaggtatacctggtgtctggccggaatttgttattcatctcttgccattttaccctcctttttaagctatgcggaaagttatttcaacccggcatttttattagagaatggcacatccgttgctgatttatcgcgctttgagagaggtaatcatcaacctgcgggcgtgtatcgggtggatctctggcgtaatgatgagttcattggttcacaggatatcgtatttgaatcgacaacagaaaatacaggtgataaatcaggtgggttaatgccctgttttaaccaggtactccttgaacgaattggccttaatagcagtgcatttcccgagttagcccagcagcaaaacaataaatgcatcaatttactgaaagctgtacctgatgccacaattaactttgattttgcagcgatgcgcctgaacatcactattcctcagatagcgttgttgagtagcgctcacggttacattccgcctgaagagtgggatgaaggtgttcctgctttactcctgaattataatttcaccggtaacagaggtaatggtaacgatagctatttttttagtgagctcagcgggattaatattggcccgtggcgtttacgcaacaatggttcctggaactattttcgcggaaatggatatcattcagaacagtggaataatattggcacctgggtacagcgcgccattattccgctgaaaagtgaactggtaatgggagacggcaatacaggaagtgatattttcgatggtgttggatttcgtggtgtacggctttattcttccgataatatgtatcctgatagccagcaagggtttgccccaacggtacgtgggattgcccgtacggcggcccagctaacgattcggcaaaatggttttattatctatcaaagctatgtttcccccggcgcttttgaaattacagatttgcacccgacatcttcaaatggcgatctggacgtcaccatcgacgaacgcgatggcaatcagcagaattacactattccgtattcaacagtgccaattttacaacgcgaagggcgtnnnnnnnnnnnnnngacggcgggcgattttcgtagcagtaatagtcagcaatcatcgcctttcttttttcagggcacggcactcggcggtttaccacaggaatttactgcctacggcgggacgcaattatctgccaattacaccgcctttttattagggctggggcgcaacctcgggaactggggcgcagtgtcgctggatgtgacccatgcgcgcagtcagttagccgacgacagtcgtcatgagggggattccattcgcttcctctatgcgaaatcgatgaacaccttcggcaccaattttcagttaatgggttaccgctattcgacacaaggtttttatacccttgatgatgttgcgtatcgtcgaatggaggggtacgaatatgattacgattatgacggtgagcatcgggatgaaccgataatcgtgaattaccacaatttacgctttagccgtaaagaccgtttgcagttaaatatttcacaatcacttaatgactttggctcgctttatatctctggtacccatcaaaaatactggaatacttcggattcagatacctggtatcaggtggggtataccagcagctgggttggcatcagttattcactctcattttcgtggaatgaatctgtagggatccccgataacgaacgtattgtcggacttaatgtttcagtgcctttcaatgttctgaccaaacgtcgctacacccgggaaaatgcgctcgaccgcgcttatgcctcctttaatgccaaccgtaacagcaacgggcaaaatagctggctggcaggtgtaggtgggaccttactggaaggccacaacctgagttatcacgtaagccagggtgatacctcgaataatgggtatacgggcagcgccacggcaaactggcaggccgcttacggtacgctgggggtcgggtataactacgaccgcgatcaacatgacgttnactggcagctgtctggcggtgtggtcggacatgaaaatggcataacgctgagccagcctttaggggataccaatgttttgattaaagcgcctggcgcaggcggtgtacgcattgaaaatcaaactggcattttaaccgactggcgcggctatgcggtgatgccgtatgccacggtttatcggtataaccgtatcgcgcttgataccaatacgatggggaattccatcgatgttgaaaaaaatattagcagcgttgtgccgacgcaaggcgcgttggttcgtgccaattttgatacccgcataggcgtgcgggcgctcattaccgttacccagggcggaaaaccggtgccgtttggatcactggtacgggaaaacagtaccggaataaccagtatggtgggtgatgacgggcaagtttatttaagtggtgcgccattgtctggtgaattactggttcagtggggagacggcgcgaactcacgctgcattgcgcactatgtattgccgaagcaaagcttacagcaagccgtcactgttatttcggcagtttgcacacatcctggctcataaaggaaattatcaatnnnnnnnnnnnnnnnnttattattggcgatggcatgtttgtgtctggcaaacatatcctgggctactgtttgtgcaaatagtactggcgtagcagaagatgaacactatgatctctcaaatgtctttaatagcaccaataaccagccagggcagattgttgttttaccggaaaaatccggctgggtaggtgtctcagcaatttgtccacccggcacgctggtgaattatacataccgtagttatgtcactaactttattgttcaggaaactatcgataattataaatatatgcaattaaatgattatctattaggtgcgatgagtctggttgatagtgtgatggatattcaatttcccccgcaaaattatattcgtatgggaacagatcctaacgtttcgcaaaaccttccgttcggggtgatggattctcgtttgatatttcgtttaaaggttattcggccctttattaacatggtggagatccccagacaggtgatgtttaccgtgtatgtgacatcaacgccttacgatccgttggttacacctgtttataccattagttttggtggccgggttgaagtaccgcaaaactgcgaattaaatgccgggcagattgttgaatttgattttggtgatatcggcgcatcgttatttagtgcggcagggccgggtaatcggcctgctggtgtcatgccgcaaaccaagagcattgcggtcaaatgtacgaatgttgctgcgcaggcttatttaacaatgcgtctggaagccagtgccgtttctggtcaggcgatggtgtcggacaatcaggatttaggttttattgtcgccgatcagaacgatacgccgatcacgcctaacgatctcaatagcgttattcctttccgtctggatgcagctgcggcagccaatgtcacacttcgcgcctggcctatcagtattaccggtcaaaaaccgaccgaagggccgtttagcgcgctggggtatttacgcgtcgattatcaatgaggtacggagaatgagaagagtattctttagctgtttctgcgggttactgtggagttccagtggatgggcagctgaccctttaggaacgattaatatcaatttgcacggtaacgttgttgatttctcctgtaccgtaaacacagcggatattgataagacggtagatttaggcagatggcctacgacacaattactgaacgctggcgataccacggcactcctcccttttagcctgcggctggagggatgtcctccgggttcagttgcgattttatttacgggaacgccggcatctgatgccaacctgctggctctggatgatcccgcaatggcacaaaccgtcgccatcgaattacgtaanagcgannnntcccggctcgcactgggggaggcgagcccgactgaggaagtagatgcaaatggcaatgtcacactaaacttttttgccaattatcgagcgttagccagcggtgttcggccaggtgtggcgaaagcggatgcgatatttatgatcaattataattnntatnnnnnnnnntcgtataatttggcgtagtcgataagctctacaattgaatgcaaacctagcttgccataaawattagatttatgcgcactaactgttttattgctaagtaataacttatcggcaatttctttattagataatccgctaactagataacgtaatatggttacttcacgattagatagcacagtgaccgttgaactattcgtactacatttattgctttttatatagtnnnnngtttcgctgggaaaaaacgtgtatccggagaggatcatctgaacggcatgaaaaatatcattctgatcattgcatttactgacaaaaccgttagcaccagcttgtatcgctctgccagcataaaagcattctgatttcgatgataaaaataacactttcactgtgctctggatttgtttgatccttttcaggaaggtaaaaccgtctgttccgggcaagtctatatccataatgattaaatcaacaggacggggtcggagataatcgatggttatgcggtaatcatccgttttcaggacaatctgcaattcactgtttttttgcaacagaacttcaatagacattctgatgataggatgagtatccataatgatcaccgacgttggtttcatagttaccagtctcataggagcggacaattttccgttagggcggtaaattgtactttgatacatgaaaatacgggttttcttgattcagacgcgcagcggtgtgcgtttgtttgccgctatagcgaaataaatcagaaaatcagacgcggtcgttcacttgttcagcaaccagatcaaaagccattgactcagcaagggttgaccgtataattcacgcgattacaccgcattgcggtatcaacgcgcccttagctcagttggatagagcaacgancttctaagtcgtgggccgcaggttcgaatcctgcaggnnnnnnnnnnnnttctttatttatgcccgtcttatccgtttccgctttgcccttcaccacatcactttttgtcgctgtttggcgagataattcaacggtgtcaggccgtaaaacgccttaaaaacagagataaagtacgacgtgctgctatagccacataattgcgccacctgagtgatatttttgttatccatcaataacatctgtacggcgtaacgcatacgacactctgtgacaatctggctatagctggtattttcgttttttaatttcnnnntgagcaggctggggcttaaacatagcgaactggcgacaattcgcagattccagtaatgctgaatatcgctttgaataatgcggcagacgctgtcgcggacgctgctgcgtaagatatacatcagtagggcaataaaccgcgattgctcaagaaagttagacaatacggtaaaaagcaatgcgcgcgtcaactccgcttcgcagggtttgctgggttgctgcttgctgtggttggcggctagccggaacacttccggtgtacggctatgacaagcgataaccggggtagccagccgcgaccagggctttacacaggttaagttcttatttaaaaacaacagataatcgttgatgatgttacggttgatgtgggtgattaatacgtgatttaacgttgagagttcaatgacgttattgttgcacgcgaaggcggccaggtagtttttcggaagggtaaacgtagcatggttattgacgcttacctctacctctttttcggtcaggatcaccacgcaaggttcactgctgctcaattgcatttcgcactcctcagatatcagaaactccgctcaaaggatctatgcttcctgcatgagtgatcggcccgttcgccgataacgatcttctttctttagcacgctttttagcaattaatcttgatggaattctgacgagagcgaaagaggtaagccaggtcgtacccgacttacctggaggagatttaatactcgagaatgccgtgcgcgacgggcaaatagcgcagagagaaatagagagtgtctttaccgcaagaggaacgtttcgctaacagcgaggcaatttctgcgtccggtttcggtttcgctgtaaaggttttgcctttgccggcgacaaacagttcataaacaatgccgcttgctggggcggagctttggcaatcggcgctggcctgtagataacgttcacgctgttcagcggtaagtttatccacgccgctgccatcctgtacccagacattaacgccggttgctttaacgtgttccagcagttggcgatagccatctggcgacatgtttccggcgaaaaaactactgatataaaccggttttgctgaaacatcgctaatcagccgctgcgcgttgtttaaccatgttagcaaaggctgacgggcggcttcgctgcgccagttcaggtcgtcannnncagcgctgaagtaccagccatccggcgttacgccaggtacggcactccataatctggcttgctggagatcggcagccagcaggcgattaagatagctttccagcgccgcggatgactgtttctggtgcataaaaaattccggatcggcgttcagcccgacaatcagcttcaggccagcctgttgcnnngctgcggcccgcttaaacaataacgnncgctgttctggctgggtgaatgcatcgccgtaacgggtccattgcaaaaccagggtatcgaagccttgcaaacgtaactgactcatcagcccctgccactgggtatcggtaacctgactatcacggttttgtggttgccagataatacctttcatcgcaaaggaaaaagggctgaccaaaagcagtgtcagcaatacgaaaatgaacttacgcatttaccagtgcactccaatggtgagaaacgcgttgttgcgctctccgttacgttgattaatcgccttaaaggtatgttgatactcgacgccgagactgactttgtgcggccaggcgtcgtantgcgtctcgccggtccagatattccagcggaccccgacaccgccaagctgcgcgccctgagtgcctttatcacgatagccgttgtcctgaacgtgagcgtaaggctcaatagtctgtccgttagctaccttctgatgccagctgacgcgataatctgccgtccacgcctgaatatcctggcggatatattgcgccgcatcgaggtacaggttttgggcaaaccagcctgaaccgttcgggtgccattcgtcgctgtatttgccgccattaaagaatgaggcgctggcgcgcagcatggtatcggatgcgccattttgcccgttcagcggcaactgctgttcgacggcgaggaaaaagatctgatcgcgcagcggcttccagcgcagaccggtgccggacatcggatttttcaccggcatcatcaccccgttttctccggtatcggcaaagaagcggctataaactgagagcaggtcgccttccagcagcatattgcgtccgatgcggtattcggcttccagttgcccgtagctacgatagcttttccctggcgctgcgccgccaacattattgttagcggtactcattgccccggaacgcaagccgatggaagaatcgaaactgaacgtccagcggcgaccgacctcctcatgcagacggcggaaattgaagcgttgctgattttgctctggggtcagtggggttatcagcgcctgattatcaatgtcatcaatcaccagccgggcgtagtgctgcgtcgcaggcatgtcatccagacgctggttcacataggccagttgtcggatcagtgccggatcgtccggtagccctttatgcgcctgttcgagcatttcccgcgactgtgcgatatcaccgctatcccacaaggcgtaaccaagcgctgcctgggtgttgctattattcggttccagttccagcgcggcnngcaaatcactcaccgcggccgggacattatgacgttggcgataaattgtcgcccgcgcaacgtaagcgttggcagaaggcgcaatattgattgagcgcgtgagatcgttcagtgcgagttccggctgaccaggaatgtaacgttgcgcatgcagccaccagtagagggcattgcttcccagtccacgttgttctgcctgttgtagccagcgatcgcgagccgcaccatttcctgccgcctgggcggtattggcagcagcaagcagatcctcattgctcatgtcgtgaagactgattttctgcctggccgccagtgcggtggcgtagtcctcaacctgatacgcctgataggctaccgcacgatgttgccaggcgttcggttgtcgttgttcggcctgaagccatgcatacaacgccacaccgggtagcgtgtcccgataacactttgccagacggttccaggcggcggcatcgtaggaaggcgacatatcgcccagcaagcgaactattgccgggcaattatctgcaatacccggcaactgactttgccactgacgttgctccgccagcggtaagggtttcgataaaatcgccaccttcgccggcgttgccaggtaaggatgactttccagcagagacgccagtcgcgccattaaagtctggctgatacgcgcatcgccctggaaaggatagcgttgcagcaataaatcggcagcttcccgtgactgctcgttctgcatcagttgccaggttagttgatccaggcgggtaagatttgccgattcttgctgatacagcaagcgtgccagacgcagagcttcagccttgttacgggtcgccacgctgacagcataacgctcctcaagcatttcattggcggggagggtggcgagcagtttttgcgctgcgtcgtactgaccttcttttaacagcaccggtagcgtcgcgccaacaacatactggcggttatcggcaaactgcaccgtataattcgccaatgcctgaacggggttggcgctgtatttagataacagatagagccaacttttctcttgtgcgtccgtggtaaacagcggcttattttcaatgagataatgctggaggcgtgctttttcgccacgataagccagcgcggtcgcgtaagtaatatatgactgaggatcggtgaagatcccctgtgattgcagtgctaggatccgatcgtccagctgcccggcaagaagcacgtcaaaccactgacggcgttctgccgcgcttaatgtgttctgctggcgtgcttcattgtatagcgtatctgcctgggaccattgtttcaggtagattgcccgttgcagcagatcggttcgcagcgtttttccttccggcgatgcagcaaacgtcgcatcgttcagttgcgctctggcgacaggtaactgtgccagccgcagggcattctgcccgacttcactgcgacaacgcagggtcggcgcagcatcgcacgctttttgctgggcaagcagttcttcaacagttgtaatgcttttcacttcaaccggaatagccgccagactgcgctcaagtcgggcatctcctgggtgacgtttcagttgatcctcaagcaacagccgcgcccggtcatcatgaccaaaatggcgataggcttccgcaaggtataaagtcagcggaatattatccggcacctgctggtgtatatattcaaattcgcggatggcggttgcttcgtcgttatttttctgtgccttcagcgccttatcgagacggggataaataacaaaatggcgataatcgctcagccccagctcttctgcgctggtgccgatattgtctgcgagtgcgctggtactcaataaagacgtcagcagtaaaccagaccatccgatgacgcgattaaggttattctccttcatgttcggactccagttgcgcaacctgttctgtgtttaaacctgctttgagtaatagtgattgcatcgaaacttgtaattcgcgttgaattgtcaggacgcgatccaacgtttcctggctgataacgccttcggtgaccaaaaacttgccgagcggcagagaactgcgttcatggcgcaataacaacacgttaattgctgaacgattaatatgaccgagcgtggtcagtatttcggcgaacaggaactgatgcggcacatattgccgccagatttcaccggcctgctgttccgtgagccactgatgctgaaccgcattgtacaacattgcccgcggatcgtgaccgcgtcggcgtgcataccagtgacgtaaccccgtgacaatttgtccccgcagaacaatgacgtaacgcactttgcgtccgactttacgcgtcagggccgccagcgaaaccgggtcaataccatcttcactgccgacaattaactcatcattttccagacgcagcggcagtaccgcataatgcagcgccacggaggccggcatttcggcaatcagcgaggacgggatctgccaggcatcgatggattcccacgccacgccgttttgctctgccagcgcctgtgccagctgctcggcgctaatcagcccctgcatcagcattgaaccgcccaggcgtagaccttcgacgcgattacgcagtgctgtatcgagctgttcttcagtgatgacctgattttccagcagaatttgacctaacgggcgcaacgagcgggtatcgccagtgacgctggggaagtcatgcgttgttttatcccacgcgacgcgacgtggatcgccgtgttgaagtacctgttttaacncgcgccagttggccataaagttaatcaggttgccccagaaaagacgcaggacagatagtagcccctgcgtcaggccgtagtagccagtgacgaaaatcacccgctgcacgatgcggttaaccatcaagccaaagtttagccacagcagggtcattaaccatgcgctgccgctaaaaatagaaaggaaatgccaggcatcgggccacaaactttcatacgccagcaacagcaaaagctggatcatcaccagcattgcgaggaagctgacaaagttactgattgcccctttgcggtcgcgccagagaaagtagttcagcgtcaggctggaggtccatttatgggttttaaagccctggaaaacaatgccgatgatccagcgagatttttgtcgaaccgcagtcgaaaaggtatcggggaaatattcgcgcacgcagatcatgtttgacgtccgtgcgtgctgtaannntttacgctgctcgcgttctttggcttcgtccaccaccggaaaacggacaaaaatttccgtcatacctttttctttcaggcggaagccaatgtcgtaatcttcagtcagactctgcacgtcgaaagcaataccgtcaccgtcagctaacagagcggtcacggcgcggcggctgaaacaggtgccgacgcctgcgntgggcacttgtccggcgagggcttcacgcaccggaacatctttgccatgcagctctgaaaactcatcaatgtaagtcatgctggtgaagtgcgtccattcgcgttcaaacggatacaccgggatctgaatcagatctttacgctcgaccagatagttgaacagacgcaattccatcggtgaaatcacatcttcggcgtcatgcagaataaaaccagcaaaagcgaaattggcgctacgctcaaactgggtgatggcgtccagcacgttgttcagacagtcggctttgctggtggggccaggacgcgcgcagactaccttatgcacattcgggaagcgagcgcacacttcgtcaacatcacgctgagtgtccgggtcgttggggtaggtgccaacaaagatatgatagttttcgtagtcgagcgtggtcgccgccagctcggccatattgccgatgacgcccgtttcattccacgccggaaccataatcgctaacggtttttcatctggtttatacagttcgcggtaactcattcgcgggtagcggcgataaacactcaacttgcgtttaatgcggcgtacccagtagacgacatcaataaaaaaatcgtccagcccgctgatgaacatgatgaccgctaacgttatcgcgattacttttaagccatagagccaggtagcaaaaacatcaagaagccagtccacacaaaaaccttacattaacgctggttatgtttagggtggcgtatattaaggttttttatgaattgtgacagctttttaccattaataggcatgactattgcggcacgttatttttacactggttataaaagttgccgtttgcgtagaatgtagacaaaagcgtggtgtcaaggaggggaggttaacgtcatagtgaagaggagtggtggcaccgatcaggtcatgatgtagtggaagtgcctggaggtgagcaggcagggcaagattacgaaagcccgctccccgcaaagactgacgccagatagtttctgtccatggctgcttttcgcatcttacgtcttaaccctgccttgaataccttatcattcgtcaaaatattaatagcaatgtgccgtatccctgaaaataattctgctgcatttcctcttcttattttgcagtcgtcttcattcactaccacgtccagacgccagtgcagcttattctccacgtgccagtggtttcggattgctgtggcgaacttctctgcggttaaatcagcagaactgatataatatctgaccgtcatttctggctctttcttttgttctgctattatggaccgaaaggagactgccacgcataatttcttcagccctttccattcaaacgtgaaatcaataagttcatcagggacatcgcaaacaatatgaagacggatttcttctctgccgtgactcttttcactcattgcgtaactgtcatgctctggattatttaattctttcagcggaaatttttcctcaaaggctttatttagccgcccctggtttccttttaccgcgaataaataatcacctccctgtttttgtatcttctctgcaatatctttctggcaacccatcgcatcagttgtgatgatttttcctttaatatccagcatgttaagaagttctgggatagctgtaatctcattagatttctcatccgtcttgatctgtccgatgaccagactgtgcattgttgagaacgcactaatgacatgaatcgctctcctgcggcgactcttgtcataagagtgccggagcgtttttccatcaattgcaatgacgtctttatcatctgaagaatggcagtcacgcatccagttaataaagcactcgtgaaattttgcaggactgatacaggatacaactctggcaatggtatcgtgaacaggaataccattttcaaaatcaccatattgcttcaaaaaattgagatgtgtttcccctaaatcctctatatcttcccagccttctgcaccagaaataacggcacaaatagtcaacagtagaatatccgataatttatgttccactttccaggcttgtctgtaatcagggataatagaaatatgttccatcaattttttaagttccattttgttctccttaattatgtaaggagtatttgatcatatgtaagctgtgaaaaacagttttagataataaggaatatctcaattattgaacatttagtgcgaattatttagtacaaaaaagcggcgttaggtgatctttccctggcctctgtgcgatgtacgccagcggtctgtaaagaaaccgaacaccttataacaaaacctctaacgtagtttataatacatcaggaatattaataaaaccttctgggtcagatatctcaataaatatcatatcaggctcaaaagtttcagngactnnnnnnnnnnnngaaattaaccaaccttgcttagaaccaatactaatagatttatagctgtaattggcatgtagactatttttaatataaggaatttcccttaactctaactcacgccgagccaagtcaagagccatttcgatagttattttgttatgttttatcaatttattagtcccatcatgaatttttctctcaatccctcaacatattttatggcntgagctatttccgcttcattgaataaatttttactttttaatatttcatttagaacgtgttcctccctagataaacgtcctagtgcttcgtatgcttctcgtccaattttcgcaaattgcttagcatgaatcacttcatgatacacctcatataaggtagcatttttcctaagataaatattgcgaagaccataatcaaaagctgccctagcatttggtggaaaatatttatctgctttccttattactttaattcctagcttctccatttctttagcaatattgtttatttgactacgtgataaacgaaccccatccaggaaacccgtatgcccactaacacgacgaccatcgccaatatagtccatcaaactgctgattttagaacttgcagccaatcccagcggatcaacccacccacaaggattcggcacataccggtaagtctgctcccctccctgcaaccccagtggatcactcaccaggtacatcccggtttccggctcgtaatatcggaaccggttatagcacaaccccgattctgcatcctgccactgtcctgcatacagcaggccggggtcggcttccgcgtcccgcncccnncgnnnnnncgggtagtctgtgtctgcgggcaggctgagtgccagcccccacaggctggtctgtcccggccgccagacggttttaccttcactgttaaagagcatcagcggacggcccgtcaggtcgttcaccgcatgattcgttcgtgtcacccactgcggggccacggacgggtgcggctgccgtacccggctgcactgctggcttatcagctcaaagccgttaaacaccaggtgccgtacgctgtacagttcatcatcgcggtattcccggatttccgcaatactgtcgccgtcccacaggtacgtgaagcggattttcttccggtcgcagcgtttctctgttcgtctgccgctggcgtcgtggcggtattcccactgctcaccctgtgcgctgcaatacccggtcagctggtcccggctgtcccaccggaaccgctctgtttccgggcgatagccgtcacggtgtctggtgcggctgaccatccggcctgcggcgtcatagtcatactgcgtgtttccggcctgtttcagccggtggcctccggcatactggtcagtctcttcacttatccggtgcccgcccgcagactgcgccttcaggtagccacagctgtcatagccataggactcatcgccttcgccatagcccagcccggtgcctgaggctgtcaccgccgtgacctggccgttccggtcaagccggtactcccgctgtgtttcccgtccgtaatcttcccggctggtgacgcctgatacgttacccgcgctgtcgtaacggtactcccgtaccagtgaggggagcagtattccccatgtggcctctttcggggaatattttccttaccaagaaatatctattatttttttatttttccatctccaagcattatatttgtttgtcacggggaataattcatggccaaaaccttccccttgccaaaacaatctccccgttaaaataaatccactgtaattattaattaaatcataaatcacagattcaattacaaatctataacgatcatcgtgaaatgtttttagtattaacaccctgatagtgcaagttgctttttgtttaccatctacatcattaaaaatcatactaccctttatttcatcagcagcatcttttattttgcatgtgtaatttacttctattttttttccagactggctagaaagatcgagtaggtaaggtttaattaaaagctgataaatattnncatataataaatcaatctctttcatattgccgccttattgttttataaccgaatgtcgttaatatcaatcccaccaaacacatctgaatatatatccactgctgatggttttgttttattaagtgttatatcaaatccttcaataactggatgtaatccatattggtttgtaggagatgtgatatcaataataccggcatctagacgtttggaaccacctgtataatgagtgccggatgtccacttaccatttactttaaatggtccattcgttgtcgcagaaactcgctctccattttttatggctggttgaatctcaactctaaatttactacctgttaattctagtcttttatttatcatgtttatgtatttattgaatgcagcctctgattttatccaatcaccattagcatatttaagtgctctattccctaatgagttcaaaacatcagatatgttgctttgctcactcccccatttcgtccagcgggctaactgacatatagccagccccaaaggatcgatatacccacaaggattcggcacataccgataagtctgctcccctccctgcaaccccagcggatcactcaccaggtacatcccggtttccggctcgtagtaccggaaccggttatagcacagccccgattctgcatcctgccactgtcccgcatacagcaggccggggtccgcttccgggtcccgctccccnngcgggtccgggtagtctgtgtctgcgggcaggctgagtgccagcccccacaggctggtctgccccggccgccagacggttttaccttcactgttaaagagcatcagcgggcggcccgtcaggtcgctcaccgcatgattcgttcgcgtcacccactgcggggccacggacggatgcggctgtcgtacccggctgaactgctggcttatcagctcaaagccgttaaacaccaggtgccttacgctgtacagtttatcatcgcggtattcccggatttccgcaatactgtcgccgtcccacaggtacgtaaaacggattttcttccggtcgcagcgtttttccgtccgtctgccgctggcgtcgtggcggtattcccactgctccccctgtgcgctgcgatacccggtcagctggtcccggctgtcccaccggaaccgctctgtttctgggcggtagccgtcacggtgttttgtgcggctgaccatccggcctgcggcgtcatagtcatactgtgtgtttccggcctgtttcagccggtggcctgcggcatactggtcagtctctccgcttatccggtgtctgcccgcagactgcgccttcaggtagccgcagctgtcatagccataagtctcgtcgccttcgccatagcccagcccggtgcctgaggctgtcaccgccgtgacctggccgttccggtcaagccggtactcccggtgtgtttcccgtccgtaatcttcccggctggtgacgcctgatacgttacccgcgctgtcgtaacggtattcccgtagcagtgaagggagcagtccgccccatgtggcttccgccgggaaaagtnnnncgcgctggctgacaggctgaccggctgcattccagccctgttcacaggcaaaaccccggttactgtgccggagcacttcacgtcccgcctcatcacggctgaacgtcagcgtctcatcccccggcaggataacctccgtcagttctccggcggcgttgtagcggtatgtggttttcagcagggatccgtcggggggtctgtcgcgttcatcttccggtggcaggatacagcggatgacggtgtgttcgtcggggtagtggtattcaatggcccgtcggccctgagtggtgacattcacccgcccgcgttcatcatagccggtgcgctgtgatgtgccgtccgggctgaagatacccgtcagcctgccggatttgtcatacgcatactgcgttttgccttccggcgtgatgacttcagccaggcggcctgcggcatcccggctgtagaggatggtttcctccaggccgttgaccctggcggtacacaggccatcagcgtcataacggtaacgacagaccacgccgccccagtcacgttcttccgtcacccggccacagttgtccagaatataaagataagactcgccctgcgggttaatgacttctgtcagttgcagcgtgtctttatcgtagcggtactgccagcggtggccttcaccgtccgttcgcgccaccggcaaatcaaacgggccgtactccattgtccagacaacgccgttaccgtccgtgtacgccagcaggttgccgtggcggtcgtagcggaatccttccgcgccggttcctgcccgctcaaggccactcagtttatggtgctgctgccactgcaaccgcactgactgaccgccggggccgcgcatcttcaccggcaggtcgtgaccgctgtattcggtgtggtgttcgcggcccatcacgtcggtgagtgtttccggccagttgtggtggtcgtactctatgcccagacgccgttcatcctggcggaatatnnccgacagcagccccnnagncgtgtacgncnnnnnnnnnnnnnnnnnnnnnnnnnnnnnnnnnnnnnnntcaccctggcggaatatccccgacagcagcccctgagcggtgtacgccagccgggtctcttcgccctgtggcgataccagactcaccggcaggccgcgttcatcacactgctgcgtccacgtctgcccggcagggtcggtgatgttgctgagcaggccgcgctcatcatagcagtactgccaatccgcgccgtctgccgccgtgtaacggcttaactgaccgtgtgcggcgttgtattcaaacttctccacccgcccggcaggggagtggcgggccagcaggtgatggaattcatcccattcatacgtggtggtgctgccgtccggcgcttcttcccgcagaatattgccgtcaggatcatagtaataacggtgaatgcccttgccgtccgtcacggtggtgcagccgtcaccatagtccagcgtggcgttgtaatagccctccgccccggtgacggtcacgcaccggccctgtgcatcgtaggtgaaacggctccacgtctggtcgttatcggaccagcggatgatccggtccgcagcgtcgtactcataaaacaggtggtagtccagccgcgcatcctgttcgtaggtcgccagcgtctgtatgccgttatccgtgcggtgaatggctttcaggtagccgctggcgtggtacgtcagtttaagccggatcccgtcggtgtgactgacacccgtgatccggtactgggtgtcgcgctcaaacgtgatgcggttgctggcggtgtcgctcatcccgcccagcatgtacatccggtctgcggggctgtgtgccaggcggtcatcgctggtatcgtcagtcaccgggtggcgcagacgcattcccggaaaggcgtcataaaagaagcggctgctcagtgcatccctgtcgaacagctccagataatcatcacggcggcgcagaatgtactgggcgtgatacgggttaaccgccgtatcactttcaccgtcgaaggcgaagttcagcgtggctcccaggctgatgacatccacccggtttccctgttcatgcacccaggcgtattcgctccaggagtcgctccagcccacgcccgtcaggccatgcagcggcagtacagaactgtggaaacgggtgaaggagagggggagtgtctggcccagcgtaaagtcggtacgttcgtcgcagtatgcgccggttaccggatcgacaggatctgttacccatctgatgactttattggcaatactttttaacgaattacctgttttccccagcaacgcgccgagctttgcgcccagcagcttaccgcttttccccagcaggtttcccagtttgcccagtttcgccagattccccagttttcccagcagtcctgctggcggcagaagatagctggctatcgttattcctcccaggatcattctctgccatggcgggaactccggctggatatccagataggtgacctgctcacccccaataaagacgtccggcgaaccttccacgattgccgcgctgcactccagtttgtcgcccttgcgcgnggcaggctgattgttgataaagacgttgctgctgccctgggctatcctcggtggtttgttctccttgtcgcagagcgccgtgtcctcaccggcttccgggaaatccacatcttttttgatttcgccacgcccgcccaccatggtggcaaactccattaataccggaccggcgggaaacagaagcgatgcgccggcgctgacgcgatccataaaaccggcattgctgtccgtcagggtgataacagcgttcccccaggccttcgccagtggtactgctttttccgctgccgattcaagcaggtcagtggcaatatcaccccatgagggttccccctgtgggacttcaggtattgctccaggtgggnnnnnagggggaagggtgacggctgcacgggctgctggctttccgttaatttttacatttttagaaccggtattgatggcgccgtccgtgtcacaaaagctgtttatccatgattcaagctggttctgtttctcctccacataatcactcgccttatagctggcatacatcagcgcaggcaccagaaccagcgcataagggccggtggcacaggcggccataatcaggcaaccttctgctatggtcactatcgcccccagcacggcccctgccagcgcccccaaaaaactcttgtgctgaatttcatcgcccagcctggcggcgggggggccagacttttttgatgccaacatctgtgcaatggctttgtcgttggctgcccgtttcatctggctggcggccatcgcccgctgcgacagcatccgcattgccagcgtaccgcctgcggtcgctccctgtggcccgcctggtccttcactcatgttttatccctcgtttatgtcagcgcggctggtccttttggatgtcattctccggtggcaacggggtgaagctctttatcacctccagcagcatcgtcttttgactgttcttcagggataaggaggtgctgaaagtgaaggtcagcagcgtatctccacgccgctggaatacggctatctggctaatccgcccctgattcccttcatcttccggaccgttccaggaataatccagcagccaggccggggcctctgccagagtgatttcccggcaggcatgttcggtgtacccatcaagtttgccctggtacagcgccagcgtttcctggtacagctctggtgtcagggttccctgtgaaacgggttcgcnggtaatgaccaggttgatgccactgttatccgtggataccaggacctgcatcgactgatcctgccattgcgatggcagttgaatatgaccttcattaaaagtgaactgcataaaatactccctgttaatctgagtgaatcagttgatgaaaacagaaccgcccacgatggtgatgccatccttcgacagcctgattaccgttgattccccgacctgtagctgaatgccatccggcgtcagcgcaattttgctttcctccacggccagcataatttccttaattgccgtataagcctgtataccgttgccttcgccaccattgtttacagcgtcaacatgcaccgaaccggcaatcgtgcctctgtcctgaaagacatcctcagataaagaccctttcagtactccggtgatcttgtggcctttttccaccgtaagaaggcggttaccttcctggatcgtgaccgtctggtcattttttacggtttcgcgatgatcgtgttttacggtggtggtacggtcgttgagcacttcggtatccatgttcttctgcgcgtggatgtagacctgttctctccctgtcgcatcatcaaacttcagctcattaaacccgctgcccatatacgttttggaacggatggtcatctgcgtcttcgtccccggcaggctgccgggggtgcggttttcctggtggtaggtgcgccccataatgatcggctggtccggatcgccgttgaggaagtccactatcacctcctgacccacacgcggtatcgccaggttgccaaaaccggtgcctgcccacgcctgtgccacacggatccagcacgagctgtcctggtctgccgggttataacggtcccagttgaatttcacccgcactcggccatgttcatcacagaagatttcctcaccctccggccccgtcacgacggcgctctgcggaccgtccaccagcggtttnnnnngcggctggggtcgccatgtccggtctgccgggatcaccgcaaaatggttctccagcgccgtccctgctccccgccttcccggcaccgcctgcggctgctcgccgtgcagttcacttgccaccacctgccattcccggttcaggttcgcctgcggatgccccgtcagcacaattcgccgtcccggccatatctccggcgagcgactcattccccgcgcggtttctgcattgtttcgccagccctccatctgccagcgggcaaagttctgcccgtgggcgcccttgaaacgtccggggtagtcatacacctcatactgcgtgcgctggtaatcctggtgctggccttcctgatcaaaacgtcctgcccagccggggcgtttaaaggtgtagtctttggtcaccacggaagaagggcggatttgtgcgctgtagcgaaactggctgatgcagagggtgctcacctcggtacgggtgttcgggttccaggggatttcaaaagattcgggcagatggcggaccgtgtcgcacagcaccaggctctggtcggtacttttgtaagcatgctcctcataaaagaagatgccttcctccgccgccatccggcacaggaaatcgtaatcagtctcaccgtactggacacaaaactcacgggaaggatgcggttcactgaacagcggactccactcggtcaccccgttttcctgcaatatcgtgccgaggatgcttttgatgtcctcgttctggaagatacggaagttctggcgcagaccggcacgccacagcggcgggtgcaccttcatgctgtacagcatctggtttttgtcgttctcccccagttcaaaccaggtcaccacacctttcacccggcgctgtacatcatcaccctgccatattgtcaggtaggccattttgtccagcacctgcgcaaattcaagggagagaaactgctggctgaccaaggagagatcgagggaaaagagcgaagagagtgactgggtgagatgaaaggaaaccaccgcaaaagcgtccggtggcaggccgtccacttccagtgtgaaacgtaatccggttgacatagcaacctccggtaaaatgaataataatccgcaccgtacaactgcggataatgagataagcgggacgacttaagacgttattagggaaggaacaaaaaatgctatgattatgtgaggattttgtttaaatattactttacagaaacgggtgtctgttcagtcaaaaaaataatcacaagctcaacttattgtttcctgacgttattcaggacaggtgcgcacatcacagcgagtaacaaaaacgcaaagttaaaccaatattcataatatgtttttattcacaactaaataacccaattaacatcattaaaatgaatgattgcttaaaaaatatatgctaccgctccaccctgataacatgatctgcacattgcacatcttaacgttgttaaatactggctcaatagtggatattttaaattaggaatttatcaaattcactttataaatggattgggtgaataatataaaaattaatgatgattaatcgcgatttgattattcattgctttatatgataggtggcttgtttataatgatggaaatttagcgaaaaacgccgtaaaccctcgccctgaatttgaacttaataatcaccccctctccggcaacacaatcacaaaccttgtcccccgcgcatttgacgtaaccgcaaccgtgcctttatgcgcgacaacaattgatttcactatcgccagcccaatgccgctaccttcgccttttcgttggcgggaggggtcaacgcggtagaaacggtcaaacaatcgcggtaagtgctcgggcgcaatgggcgtaccggggttttcgacgataacttgcaccagatgatcgaccgtctggcagcgcactacaatagcctctccgggtggcgtataacgcagggcgttcgaaagcaggttgcttaacgcccgacgcagcatcagcggatcgcccgcaacctggcactcgtcgccaacaaactgcagctccacgccgcgatcttccgctaaagcctcgaaaaaatcgaacactttgccgacttcatccgccaggttgagcattttcttttcggggattaactggttgttatcggcctgggcgagaaacagcatatcgctgaccattttcgccattcgcgtcagctcttcgagattagagtagagcacatcttccagctccttctggctgcgcgactggctgagggcgatttccgtttgcgttatgagattagtaattggtgtgcgaatttcgtgggcgatatccgctgagaaattggactggcgggtaaagacatcctcaatacgctcgatcatatggttgaacgacagtaccagctgttccagctcaatcggcacggtctgcgggtcaaggcggacgtcgagatctttcgaggtgatattctggatttgacggctgacgctgcggatcggcgcgtgacctttatgaaccgccaatagcacgataaagacgatcaggatgctgatgaccgatgcggtcataataagtttattcatcaaatcatttatgtaatgaagatgaaaatcgatcgaaagcgcgatgtagagcgtataaatcggtttgccgtcaaccagtgggccaactggcaaactgatcatccgccagttgctgtgttccatatgcccgtgaccgtggcctggcatcatcatcgtcgggccggagaggagaaacacctcgccgccccgcgcgtctttatcgggtatggcatcgcgcgcaaactcgcggatatcaggcgcaccgggggagtgatacaccgttttaccgtggctatctgccagggaaatcaacacattggaataaccactgacgatatcttccagcgtcattaagcgtcgggcttgcgtttcgtcagggtgatttagtacgcgttcaagggtggcactaatctcttttaaatcattaatatcctgctcggcaaaatgcacttttactgagtggatcatgatccatgcaaaggcgaaaaacgccgcgatggtggccaggctgataaaaaaggtcaggcgggttgccagcgaaaacgggcgctgaaatggcttactgaccatccggcacctcaagcatgtaacccacgccgcgcacggtttgaatcagcttcggctcaaagtcgttgtcgattttgccgcgtagccgcttcaccgccacatcaatggcgttagtgtcgctgtcaaaattcatgtcccatacctgcgaggcgataagcgagcggggcagcacttcgccctgatggcggagaaaaaactccagcagagtaaactctttactggtcagagtgatgcgcgtgccgctgcgggtgactttgcggctgacgagatcgaccatcaaatcggcaacctgaaactgactttcgataatcaccgccgccccgcgccncaggagagtgcgcacccgcgccagcagttcagcaaacgcgaacggcttcaccagatagtcatcggcccccaactccagccccttgacgcgatgttcaatggtgccaagcgcggtaagcaacagaatcggcatccctttattggcggagcgcaacatgcgcacgatatcccagccgttcacgtccggcagcataatatcgaggattatcaggtcataatctccggtcatcgccagatggtagccattcagcccgttgtcggccaaatcgaccacaaaaccggcttcggttaaccctttggtcaagtattctccggttttcttttcatcttcgacaatcaacagtttcatatttcctccgcatgttgcccgggcaattctagagtagcgggatcagatggcaatcgcttattggcaaaatgacaattttgtcattttcctgtcaccggaaaatcagagcctggcgagtaaagttggcggtataaaatcaccagaaattatgagcctatgtctccttgtaaacttctgccattttgtgtggcccttgcgctaaccggttgttcactggcaccggattatcagcgcccggcaatgcccgtaccgcagcagttctcactcagccagaacggcctggttaacgcagcagataactatcagaacgcgggctggcgcaccttttttgttgataatcaggtgaagacgctgattagcgaggcgctggagaataaccgggatttgcgcatggcgacgctgaaagtgcaggaggcacgggcgcaatatcgtctgactgatgccgaccgctacccacagctcaatggtgagggcagcggcagctggagcggcaatcttaaaggcgattcagccacgacgcgggagttttctactggccttaacgccagctttgacctcgattttttcgggcgcttaaagaacatgagcgaagccgagcgacaaaattatttagccactgaggaagctcagcgcgcggtgcatattctgctggtttctaatgtcgcgcaaagctatttcaatcagcagctggcgtatgcgcaattgcaaatagccgaagaaacgctgcgtaattatcagcagtcatatgcgtttgtcgaaaaacaactgttgacaggtagcagtaatgttctggcgctggaacaggctcgcggggtgattgaaagtacccgcagcgacatcgctaaacgtcagggggaactggcgcaggcgaataatgcattgcaactgttactgggaagctacggcaagctgccgcaagcgcagacagtaaacagcgacagcctgcaaagcgttaaattaccggcgggcttgtcgtcgcaaatcttattgcagcgcccggatattatggaagctgaacatgcgttaatggcggctaatgccaatattggtgctgcacgcgcggcatttttcccgtctatcagcctgaccagcggaatatcaaccgccagcagcgatctgtcgtcattatttaacgccagcagcgggatgtggaattttattccnaaaattgagatccccatttttaatgccggacgcaaccaggccaatctggatatcgccgaaattcgccagcagcagtcggtagttaattatgaacagaaaatccagaacgcctttaaagaagtggcagatgcgctggcattacgtcaaagcctgaacgatcaaattagcgcccagcagcgttatctggcatcgctgcaaattactttgcaacgggcgcgggcattatatcagcacggcgcagtaagttatctggaagtgctggatgccgagcgttctttatttgcaacccgacaaaccgtacttgacctgaattatgcccgtcaggtcaacgaaatttctttatataccgcacttggtggcggttggcagcaataatttttaactccaggagaaaataaatgaaaaaagcactgcaagtcgcaatgttcagtctgtttaccgttattggctttaatgcccaggctaacgaacatcatcatgaaaccatgagcgaagcacaaccacaggtcattagtgccaccggcgtggtaaaaggttttgatctggaaagtaaaaaaatcaccatccatcacgatccgattgctgccgtgaactggccggagatgaccatgcgctttaccatcaccccgcagacgaaaatgagtggaattaaaaccggcgacaaagtggcgtttaattttgtccagcagggcaacctttctttattacaggatattaaagtcagccagtaacccaggtttaatgagatgaaaaaaatcgcgcttattatcggcagcatgatcgcgggcggtattatttctgcggcaggttttacctggtttgcaaaggcggaaccgcctgcagaaaaaacgtcgaccgcagaacgtaaaatcttattctggtacgacccgatgtatcccaatacgcggttcgataaaccaggtaaatcgccgtttatggatatggatctggtgccgaaatatgccgatgaagagagttctgcgtctggtgtgcgcattgacccgactcagacgcagaatctgggggtgaaaacggctaccgtcacgcgcgggccgctgacttttgcccagagtttcccggcgaatgtcagttacaacgagtatcagtatgccattgtgcaggctcgcgccgccgggtttatcgacaaggtgtatccgcttaccgtgggcgataaagtacaaaagggcgcgccgcttctcgacctgaccattcccgactgggtggaagcgcagagtgagtatttactgctgcgcgaaaccggcggtacggcgacccagaccgaaggcattcttgagcggctgcgactggcgggaatgccggaggcggatattcgccgcctgatcgccacgcaaaaaatccagactcgctttacgctcaaagcacccattgatggcgtgatcaccgcgtttgatctgcgcgcgggaatgaatatcgccaaagataacgtggtagcgaaaattcagggtatggacccggtgtgggtcactgctgcgatcccggagtccatcgcctggctggtgaaagatgcctcgcagtttacgctcaccgttccggcgcgacctgataaaacactcaccatccgcaaatggacgctactacctggcgtggatgccgcgacccgcacgctgcagctgcgtctggaagtcgacaacgccgacgaggcgctaaaaccgggaatgaacgcctggttgcaactcaataccgccagcgaaccgatgctgctcattccgtcacaggcgctgattgataccggcagcgaacagcgggtgattaccgttgatgccgacgggcgctttgtaccaaaacgcgttgccgttttccaggcatcgcaaggtgtcaccgcattacgctctggtctggcggaaggtgaaaaggtggtttccagcggcctgttcctgattgattccgaagccaatatttctggcgcactggagcggatgcgctctgaaagtgctacccatgcgcattgagggaataaccaatgattgaatggattattcgtcgctcggtggcgaaccgttttttggtgctgatgggcgcgttatttctgagtatctggggcacctggaccatcattaacacgccagtggatgcgttgccggatctctccgatgtgcaggtgattattaaaaccagctatcccggtcaggcaccgcaaatcgttgaaaatcaggtgacttatccgctaactaccaccatgttgtcggtgcctggcgcgaagactgtgcgtggtttctcgcagtttggcgactcttatgtgtatgtaattttcgaagatggtaccgatccgtactgggcgcgttcgcgggtgctggagtacctcaaccaggtacagggtaagctgcctgcgggagtcagcgccgagctgggaccagatgccacgggtgttggctggatctatgaatatgcactggtggatcgcagcggtaagcacgatctggccgatttacgctcattgcaggactggtttctcaaatatgagctaaaaaccatccctgacgttgcggaagtggcgtcggtgggcggcgtggtgaaagagtatcaggtggttatcgatcctcagcgcctggcgcagtatggcatcagtctcgccgaagtaaaaagcgcgctggatgcttcaaaccaggaagcgggcggttcgtcaatcgaactggcggaagcagaatatatggtgcgcgccagcggctatctacaaacgctcgacggctttaatcacatcgttttaaaagccagtgaaaatggcgtgcctgtttatctgcgtgatgttgcgaagatccaggttggcccggagatgcgccggggcattgccgaactgaacggcgaagttgtgggcggggtggtgatcctacgctccggcaaaaacgcccgtgaagtgatcgccgccgtgaaggacaaactggaaacgctgaaaagcagtctgccggaaggcgtggagatagttacaacatacgatcgcagccagctcattgaccgggccatcgacaacctcagcggcaagttgctggaagagtttattgtggtggcggtagtctgtgcgctgtttctctggcatgtgcgctcggcgctggtggcgattatttcgttgccgctggggttgtgtattgcttttattgtcatgcacttccaggggctgaatgccaatattatgtcgttgggtggcattgcgattgccgtcggggcgatggtcgatgccgctatcgtcatgatcgagaatgcacataaacggctggaagagtggcagcaccagcatcctgacgccacgctggataataaaacgcgctggcaggtgattaccaatgcatctgttgaagtggggccggcgctgtttatcagtctgctgattatcacgctgtcgtttatcccgatcttcaccctggaagggcaggaagggcgtctgtttggcccgctggcgttcaccaaaacgtatgcgatggcgggtgcggcgctgctggcgatcgtagtgatccctatcctgatgggttactggatccgtggcaaaattccgccggaaagcagtaacccgctcaatcgctttttgattcgtgtttatcatccgctgttgctgaaagtactgcactggccgaaaaccacgctgttggtggcagcgctttcggtgctgacggttctctggccgctcaataaagttggcggggaatttttaccgcagatcaatgaaggcgacttgttgtatatgccatcgacgctgccggggatttccgcagcagaggcggcgagtatgctgcaaaaaaccgacaagctaattatgagcgtacctgaagtggcgcgggtatttggcaaaaccgggaaagcggaaaccgccaccgattctgctccgctggagatggtagaaacgaccatccagcttaagccgcaggagcagtggcggccaggcatgacaatggacaaaatcattgaggaactggataacaccgtgcgtctgccggggctggcgaatctgtgggtgccgccaattcgtaaccgtatcgatatgctctcaaccggcattaaaagccctatcggcataaaagtttccggcactgtgctggcggatatcgacgcgatggcggagcaaattgaagaggtggcacgaacggtgccaggcgtggcttctgcgcttgccgagcggctggaaggtgggcgctatatcaacgttgagattaaccgtgaaaaagccgcacgttacggtatgacggtggcggatgtgcagttgtttgtgacttctgcggtgggcggggcgatggttggcgaaacggtggaagggattgcccgttatccaattaatctgcgttatccgcaaagctggcgcgatagtccgcaggcactgcgccagttgccgatcctgacgccgatgaagcagcaaatcaccctggcagacgtggccgacgttaaagtctctaccggaccgtcgatgctgaaaaccgagaatgcgcgcccgacgagctggatttatatcgatgcccgcgatcgtgacatggtgtcggtggttcacgatttgcaaaaagcgatagctgaaaaagtgcagttaaaaccgggcaccagcgtggcattctccgggcagttcgagctactggagcgcgccaaccataagctgaaactcatggtgccgatgacgttgatgatcatcttcgtgctgttgtatctggcgttccgtcgggtgggcgaagcgttgctgattatcagcagcgtaccgtttgcgctggtgggcggcatctggttgctgtggtggatgggctttcatctttctgtggcgacgggcaccggttttattgcccttgccggggtcgccgccgaatttggcgtggtgatgctgatgtatttacgtcacgccatagaggccgagccgtcgttgaataatccgcaaacattcagcgagcagaagctggatgaggcgttatatcacggcgcggtcctgcgcgtgcgcccgaaagcgatgacggtggcggtgattatcgctggtctgctgccgattctgtggggaacgggggcaggatcagaggtgatgagccggattgccgcgccgatgattggcggcatgatcaccgcgcctttgctgtcgctgtttattatcccggcagcgtataagctgatgtggctgcaccgacatcgggtacggaaataaaagcaggatacccggtttaaccgtgtggattgtgtcttgcgacgatgggcactaaatgttaaaaggtgcccctcaacaaaaaagacacacaggggaaaggcgtgaaaaacgcgtcaaacgtatcggaagatactgcgtcgaatcaagagccgacgcttcatcgcggattacataaccgtcatattcaactgattgcgctgggtggcgcaattggtactggtctgtttcttggcattggcccggcgattcagatggcgggtccggctgtattgctgggctacggcgtcgccgggatcatcgctttcctgattatgcgccagctcggcgagatggtggtcgaagagccggtatccggttcatttgcccactttgcctataaatactggggaccgttcgccgggttcctctccggctggaactactgggtgatgttcgtgctggtgggaatggcagagctgaccgctgcgggcatctatatgcagtactggttcccggatgttccaacgtggatttgggctgccgccttctttattatcatcaacgccgttaacctggtgaacgtgcgcttatatggcgaaaccgagttctggtttgcgctgattaaagtgctggcaatcatcggtatgatcggctttggcctgtggctgctgttttctggtcacggcggcgagaaagccagtatcgacaacctctggcgctacggtggtttcttcgccaccggctggaatgggctgattttgtcgctggcggtaattatgttctccttcggcggtctggagctgattgggattactgccgctgaagcgcgcgatccggaaaaaagcattccaaaagcggtaaatcaggtggtgtatcgcatcctgctgttttacatcggttcactggtggttttactggcgctctatccgtgggtggaagtgaaatccaacagtagcccgtttgtgatgattttccataatctcgacagcaacgtggtagcttctgcgctgaacttcgtcattctggtagcatcgctgtcagtgtataacagcggggtttactctaacagccgcatgctgtttggcctttctgtgcagggtaatgcgccgaagttccttacccgtgttagccgtcgcggcgtgccgattaactcgctgatgctttccggagcaatcacttcgctggtggtgttaatcaactatctgctgccgcaaaaagcgtttggtctgctgatggcgctggtggtagcaacgctgctgttgaactggattatgatctgtctggcgcatctgcgttttcgtgcagcgatgcgacgtcaggggcgtgaaacacagtttaaggcgctgctctatccgttcggcaactatctttgcatcgccttcctcgccatgattttgctgctgatgtgcacgatggatgatatgcgcttgtcagcgatcctgctgccggtgtggattgtattcctgtttgtagcatttaaaacgctgcgtcggaaataaggcattcacgctacatccgacaaaacgatgtccgctctcatccattcgatgagagcggtttttttaattactgcttaaatgcacccgccagagagcgaatatcattgccggttggcgactgatgaagtcgcagaccaaactcttcgacaatcgcaaatatgtgatcgaatatatcagcctgaatgctttcatattccagccacaccacggtgttggtaaacgcatagatctcgagcggtaaaccgttatcacctggagccagttggcgtaccattaaggtcatatctttacgaatccgcggatggttacgcagatattcgttcagataggcacgaaaggttccaatattggtcattcggngcaggtttaataccgactccgtagaaccttgctggcgattccactcattaatttcctgatggcggctggttaaataaggctttaacaaatgcgctttattcagacgttgcatttcgtcttcatcaagaaaacgaatactggtgacatcaatactgatactgcgcttaatacgtcgcccgccagatgctgacatcccgctccagtttttaaaggagtcagaaaccagagaccaggtgggaatagtggtaatggtattgtcccagttacgcaccttgacggtggttaacccaatatcgatcaccgcgccatccgcgccgtatttcggcatctccagccagtcgcccagtttcagcatatcgttcgcggaaagctgaatacctgccaccagaccaagaatcggatctttaaataccaacatcagcacggcagccattgcaccaagaccgctgatcagaatcgctggcgactgaccaatcagcagcgagatcatcaaaatgccgaccagaatcgcgccgatcagtttaatcccctgaaatatccctttcagcggtaactgagatgctgccgggaatttctgcgccagattcaaaataacatccagcagcgagaagactgaaagcagcgcatacatcatgatccacaactgcgcgcaggtagtcagaatatctgccgcttcggtgcctttttgcagccagaataccgcctgaatattgacgataatcccctgcagggtaaaagctaaacggtggaagagtttattctgggtaatgatttgcaaccaaagccgtgaactggcgatggcacgtttttcgaaggtccgcagtaccacccaatgcaaaataatatgcaccacgacggcggtcagaaaaataataccgaaaatcatcaccatcgaggtggtgtgatcgatctcaatacccgctaaatcttcaacatgggatattaaatcctgcataacgtctcctttatacaacagcagcctatgatgacggctgaaacagggttatgcaaatcaggagaatctgaggggaaatagccgggcagatgcccggcaagggaggattacacttcggttaaggtaatgttttgcggcagacgagatttcggcagcgtagcgttaaaatcttcaacgctgtgatgacccaccggaactaccaccagactggtgtagcctttctctttcagaccaaattctgcatcgaggatggcggcgtcaaaaccttcgatgggtaccgcgtccagacccagagccgccacgccgagcaggaaattaccgacgttgagataaacctgttttgccatccactctgcatcatcatgcagatctttacggtgcatatcggcgaagaacttgcgacctttatcgttcgcggctttcgcttccggcgtggcaaagcggccatcagcatcttcctggtcaacaaccagcttcagccaggcatcgtccatcgcggtttttgcacagaacaccacgacgtgcgaggcatcaagtattttacgttcgttgaacacataattaccggcagcggatttggcaacacgcgctttaccttcttccgtgctggcaacaataaaatgccacggctgggagttggtgctggatgggctgtattgcaggagagttttgatctgctcggcctgttccggggtaagttttttgctggcatcaaatgccttagtggaatgacgctttaaggcgacagaaatgatatccataaagactccatgtgaaagtaattttgcgtgccagcagattacaaggttcaacgagaaatggtaagcgagaaaaatgcgctatagatttccgctttagcctggacgcactcttttttgatcgcgtttagccagaccatcaaccaccagattccacgaatcgttgatcagatcgcgaagtaacgcttcggagatttcctcgccgggatacaccgaaatccagtgctttttattcatgtgataccctggcttaatgcttgggtatatttgctgatttaacagggatttttgtggatcggacttcagattgataaaggggacgccgcgtagctccgacgacagcataaaaatcttgccgccaattttaaaaacatcgaactccgggccaaaaggccagcaaagctcgacaaagggtaactcaagggccaggcgtttcgccgtttcgtgcagtgattgcttatccataaacgttcctttaggcgaaggagaataagcaaagtatgccgcgaagtacggcgataatcgacgtttaatccgccagcgagaaccagcgtcgccagataaagcgcagaacaaaatactcaatagcgcccagcactaaaaaccacagacaaaacaataaagtgtaaagctgactaagatccatcagatggaacgtggtcaccagtttttgtgccagcgtaagccccagtgcgggggcgggcagcagcaggcaagagaggaaagccatcagcaaaatgcctgctgcggtggtcaaggtttctaaagggtgtttcataacattgttaaatgtaagttaaaacaccattgtcagggatattcttctgtaaggcaattcccggcttagtcaccggcccagatctcacaatgctttttcaccagcccaatcagcgagccgccatcggcgacgaaatcgcgcatcagctgcgcttcattcagaccgctgacgacctggcgatgcagggcctcaatcgcgctcgatgcaccaattttatgtgcagaaggggcgattttttccagcaatcgcaaggtgtcttccgttagtggtcgacgatcgccagtgtacggatcggtaatgacgccttccagcccatancggcaggcctggaaacggttgaatttatacagcaggtaatctttctccttatgtttgaacgggcgttctgtcagtaaccagtgggcggtggcctgaattaatcccgccatatttaccgcgtggctaagggttaacggggtatccatcacccgaacntccaccgtgccaaaatgaggactggggcgaatatcccagtgcagatctttaatgctgtcgatcatcgtggtgtaactcagacagcgaaacagggcttcaaattgttgccagttactgacccacggcatcgggccattatcaggaaaggcggaaaaaatattcggtcgtgaggaggcaaaacgcgtatccgttccctgcatatatggcgacgcggcggaaagggcgataaagtgcggcacaaaccgtgacaagccgtgcagcaaataaatggcgtcatcgccactggcacagccaacatggacatgctgaccaaaaacggtcgcctgctggatgagatagccaaagttttccagcgttcgttgatagcgttcgttgtcgcatacctcctgacgctgccatttctgaaacgggtgcgtgccaccgccgcaaatttccagatgatggtctgcggctgcctgcaatacgactttctgcatcgctgaaaattgcccggcagcctggttgatatcacggcaaacatccgtcgccagctccagcatactttcggtgatatcgtgctttacctctccggccgtgatcttatttttaaccgcgtcaatcagcattgaagagtcctggcttaagtcatagcccggcggattaaccacctgcatttccagttcaataccgagggtaaaaggttcagaaacatgaaaatcgggtaatggcataggtttctcttatgttggagttttctattcagtatagaagtcggagcggctgggcgagatgcggaagttctggaatgtttctttttttggtgatggtgactgaagcaatttggctacttttgcaatgtgacaagttatggcacggctggctggtggcgaagaattttgacgattgaggcatgcagaaaaaacgggctcagcttcagttgattaaatgaggagtgagaagtccgaaacaggatttactgtataaatnaacagctattttgttgaggaagggtaagataacggcgggtgcctgaagctttccggtttcaggtttactctgaggtctggaaagatgaagctccaggagatatttctatcaaccctggggctgccactccaaaccagacaatttggatggtagttccttcttcgcatggaggcaatataaacatgctgacgaaatatgcccttgtggcagtcatagtgctgtgtttgacggtaccgggatttacgcttctggtcggagactcgctgtgtgagtttacggtgaaggaacgtaatattgagttcagggctgttctcgcttacgaaccgaagaagtagccgttgtgcggggagtaatccccgcatatccggttgtcaggtcaggatggtaaggcacctgctttacactttcgcccgcggtcagtgatggctgcgggcgatttcgttttaagagcaatgatgagttttgccgacagaagtccgaaacaggattcactgtataaataaacagctattttgctaaggaagggtaagataacggcgggtgcctgnngctttccggtttcaggttaactctgaggtctggaaagatgaagccccaggagatatttctatcaatcctggggctgccactccgagccccaacaactcggatggtagtcccttcttcgcatggaggcaatataaacatgctgacgaaatatgcccttgtggcagtcatagtgctgtgtttgacggtgctgggatttacgcttctggtcggagactcgctgtgtgagttcaccgtaaaggaacgtaatattgagtttaaggctgttctcgcttacgaaccgaagaagtagccgttgtgcggggagcaatccccgcatatccggttgtcaggtcagagtggtaaggcacctgctttacactttcgcccgcagtcagtgatggctgcgggcgaatcgtaccagatgttgtcaattaatcgtgttggcacagagttatgactattttttcttttatctgccagtgcacagcaaacatctcattctcacgatgaatgatgacctgctgtttattccagctaattatctgatagtccagaaaacctgcatcagtttggatctcacttgccttaaatgcgctctctttggcggaaaatgccagtgtcagcgccagagaaaaggctaaaccgcagtctgcgagtcgctcgtgttctgctggtgtaataatgttgtctgtcaattcggtcgctgtttgcgcagaaaaaatttcttcgatatcaacgccaatcggttgacgggaaaccacggccaatgccgtagccccgcagtggctaatactgccgtatacctccgcaggccacaccggttggcgtagctcgccgattgcgggcacacatttatagccatattcccgcaaggcataaacagcagcgatccgtccggctaaatgctctgttttacgtttacgtccagcgtgttgcagttgtgcgtagtgcggcagccagagtaaatcctgctcacaaaaattcgccggatcgaactcaacaaaatgcagcgtatgtccggcaaaggggagggaggtatgcgtagttttcatatcgaccatattcgagactgatgacaaacgcaaaactgcctgatgcgctacgcttatcaggcctacatggtcctgcaatatattgaattggcaagatttttgtaggccggataaggcgttcacgccgcatccggcatgaacgacgcgcactttgtcaacaatctgacgttagcatcagaagtgagtgtttacgctcatataccacgtacgtcccggctcgttataggtatacgccccggcaccggcgatatagttggcccctgccaaatcgcccgtggtctgggcattacccgcacgccacaaacgtttgtcgaacagattgtccacgccgccggtcagactgacattcttcgtcacatcccacgtcgcgctcagcccaacaatgctgtaaggactaatttctttggtttccggtccaaccgctggctgacctttatagttgtacttcttcggctgctgcttaccgtaccaggtgaaggtcgtttgcatcgacaaatcttctcgtgcctgccagctcagcgttgagttcaacgtatactccgggatgatcgacaaacggtcgcccgtggttttgttttcactcttcagcatataagtgatgttattagtccacatcaccgtttcgctaaccggtacgtttaacgatccttccagaccttcaaccaccgctttcggcacgttatcccactgatagagatcggtgccgactgcgttttgccctacagcaacatagcctgcttcaatcttattgcgataatcgttacggaaccaggtgatgcccgccagccagccgtcgcgtttgaactccagaccaatctctttgttgatgctggtttctgctttcaggtcatcgttaccttgcagatagcagccgcccgcgctggcatagcagccctgacctttactgtagagaatgtagttcgggttagtctggtacaggctcggcgctttataggcgcgggcaatgcccattttcagcgtgaagtcatcgcctaaaccttgcgatatgttcagcgccgggctccagttattgccgacaatactgtgatgatcgaaacgcagccccggcgttacgatggtgctgtcagtcagctccatgttgttttcggcaaacagcgagaaaatttctgcttttgaatacgggctacggtcggtggcactcacgccatcaatagcgccaccggtattcgttccggtcagtgcctgggtgttggaacttaagtccttcatccgctgctgattccactccgtacccagcgtcagcgtctggttaacgaggaaatcaatcggcaggttaacttcgctatgcagcatcacgtcatcaagatcgttatcgacgaaatcctgtgtcgctttttcgttaaatttcccttcggtaccgcccgccagaccttccggaatacgcgagttacgggtgtgttcgtactgcacccagttgctggtggtcacgccgttatcccagccaccgttccaggtcagcgagtagttctggcgatacaggcggttggtttcatcgccatatttcgagcgagtgtaagcgtcagagttggtgttctgggtatcgcccgcatacaggttaccctggcggctgtaacccgcttccagttccagcgattgcaatggtgcgaagtcccagcgcaccacgccattaatatctttattgatcaccccttcgcgcccggctggtaacgtcgtggcatacgttccggcacgcgcggactgatgaccctggttgatatcccacgcgtcagcctgggttttgtcgaggttgccatacaagcggaagctgaattcgtcgcccagcggaccggtcaggctaaagttagtgcgtttggtggcaccttcctctttatgttctggcgcattgaaatatgcgtcccaggagccgtgccactcgccgctgccttttttggtaatgatgttaaccacgccgcccgccgcgccgttgccataacgcncagctgccggaccacgcagaacttcaatacgttcaatcatttcaggtggcacccaggaggtatcaccacgggtatcgcgctcgccacgccagccctgacgcaccgagttacggctgcttaccggcttgccgtcaatcaaaatcagcgtgttttccggacccataccgcgaatatcaatctgtcggttattccctcgctgaccactggtggagttaccggtcaggttaacgcctggcatggtacggatgatctccgaaacatcgcgggcaacggggtttttgcggatttcatctgcggtgatggtcgaaacgccaggcgcctgtaagttctgctcggcggcggtaacgacaatagtatcgtcatgtgaaacaggagtatcggtcggntcttgtgcctgcgctaccccataaatccccagattgaccaacaaggccagggaatgaatcttcttgttcattgttttattcctgcatttttgccacgaattgcaactgtcgggcatggtcgtcatcaacacgacgcatcccgctaccgcgaaaacctttgatcctgaaagacacgcagtgcagttggttaattaatgtccgcgcttcccacggcangccattacgctattgcaaatgcaaatagttatcaataatattatcaatatatttctgcaatcaatgaaaaattgcacagtaaacatggggttatggtgtgacggcgttaaaagtaggaagtgagagctggtggcagtcgaaacatggcccggaatggcagcgtctgaatgacgaaatgtttgaggtcactttctggtggcgtgatccccaaggttctgaagaatactcgacgataaagcgcgtatggatctacatcactggtgtgaccgatcatcatcagaacagccagccccagtcgatgcagcgaattgcaggtactgatgtctggcagtggacgacacaactcaatgccaactggcgcggcagctactgctttattcccaccgaacgcgatgacattttttctgcaccatcccccgatcgcctcgaattacgtgaaggctggcgaaaactattaccccaggcaatagccgatccgctgaatccacaaagctggaaaggcgggcgagggcacgctgtttctgcactcgaaatgccgcaagcgcctctgcaaccgggatgggattgtccgcaagcgccagaaataccagccaaagaaattatctggaaaagtgaacggttgaaaaattcacgtcgtgtatggatttttaccaccggcgatgtaacagcagaagaacgcccgctggcagttttgctcgatggcgaattttgggcgcaaagtatgcccgtctggcctgtgctgatttcgctgacccatcgtcagcaacttcctcccgccgtgtatgtgttgatcgacgctatcgacaccacgcaccgcgcccacgaactgccgtgtaatgcggatttctggctggcagtacagcaagagttattacccctggtgaaagctattgccccttttagcgatcgcgccgatcgcaccgtggtcgccgggcagagttttggtgggctgtccgcgctgtatgccggactgcactggcctgaacgctttggctgtgtattaagccagtcaggatcgtactggtggccgcatcggggcgggcagcaagagggcgtgttacttgaaaagctaaaagctggtgaagttagcgccgaaggtctgcgcattgtgctggaagcgggtattcgcgagccgatgatcatgcgggccaatcaggcgctgtatgcgcaattacaccctataaaagaatccattttctggcgtcaggttgacggcggacatgatgcgctttgttggcgcggtggcttgatgcaggggttaatcgacctctggcaaccacttttccatgacaggagttgaatatggcattcagtaatcccttcgatgatccacagggagtgttttacattttgcgcaatgcgcaggggcaattcagtctgtggccgcaacaatgcgccttaccggcaggctgggacattgtgtgtcagccgcagtcacaagagtcctgccagcagtggctggaagtccactggcgtactctgacaccggcgaatttcacccagttgcaggaggcacaatgagccagcatttacctttggtcgccgcacagcccggcatctggatggcagaaaaactgtcagaattaccctccgcctggagcgtggcgcattacgttgagttaaccggagaggttgatgcgccattactggcccgcgcggtggttgccggattagcgcaagcagatacgctgcggatgcgttttacggaagataacggcgaagtctggcaatgggtcgatgatgcgctgatattcgaactgccagaaattatcgacctgcgaaccaatattgatccgcacggtactgcgcaggcattaatgcaggcggatttgcaacaagatttgcgcgtcgatagcggtaaaccactggtctttcaccagctgatacaggtggcagataaccgctggtactggtatcagcgttatcaccatttgctggtcgatggcttcagtttcccggccattacccggcagatcgccaacatttactgcgcattgctgcgtggcgaacaaacgcctgcttcgccgtttacgcctttcgctgatgtagtggaagagtaccagcaataccgcgaaagcgaagcctggcagcgtgatgcggcattctgggcggaacagcgtcgtcaactgccgccgcccgcgtcactttctccggcacctttagcggggcgcagcgcttcggcagatattctacgcctgaaactggaatttaccgacggggaattccgccagctggctacgcaactttcaggtgtgcagcgtaccgatttagcccttgcgctggcagccttttggctggggcgattgtgcaatcgcatggactacgccgccggatttatctttatgcgtcgactgggctcggcggcgctgacggctaccggacccgtgctcaacgttttaccgttgggtattcacattgcggcacaagaaacgctgccggaactggcaacccgactggcagcacaactgaaaaaaatgcgtcgtcatcaacgttacgatgccgaacaaattgtccgtgacagcgggcgagcggcaggtgatgaaccgctgtttggtccggtactcaatatcaaggtatttgattaccaactggatattcctggtgttcaggcgcaaacccataccctggcaaccggtccggttaatgaccttgaactggccctgttcccggatgaacacggtgatttgagtattgagatcctcgccaataaacagcgttacgatgagccaacgttaatccagcatgctgaacgcctgaaaatgctgatcgcccaattcgctgcggatccggcgctgttgtgnggcgatgttgatattatgctgccaggtgagtatgcgcagctggcgcagatcaacgccactcaggttgagattccagaaaccacgcttagcgcnnnnnnggcagaacaagcggcaaaaacaccggatgctccggcgctggcagatgcgcgttaccagttcagctatcgggaaatgcgcgagcaggtggtggcgctggcgaatctgctgcgtgagcacggcgttaaaccaggggacagcgtggcggtggcattaccgcgctcggtctttttgaccctggcgctacatgcgattgttgaagcaggtgcggcctggttaccgctggataccggttatccggacgatcgcctgaaaatgatgctggaagatgcgcgtccgtcgctgttaatcaccaccgacgatcaactgccgcgctttgccgatgttccagatttaaccaatctttgctataacgccccgcttacaccgcagggcagtgcgccgctgcaactttcacaaccgcatcacacggcttatatcatctttacctctggctccaccggcaggccgaaaggggtaatggtcgggcagacggctatcgttaaccgcctgttgtggatgcaaaatcattatccacttacaggtgaagatgtcgttgcccaaaaaacgccgtgcagttttgatgtctcggtgtgggagtttttctggccgtttattgccggggctaaactggtgatggctgaaccggaagcgcaccgcgacccgctcgctatgcagcaattctttgccgaatatggcgtaacgaccacgcactttgtgccgtcgatgctggcggcatttgttgcatcgctgacgccgcaaaccgctcgccagaattgcgcgacgttgaaacaggttttctgtagtggtgaggccttaccggctgatttatgccgcgaatggcaacagttaacgggcgnnncgttgcataatctatatggcccgacggaagcggcggtagatgtgagttggtatccggcttttggcgaggaactggcacaggtgcgcggcagcagtgtgccgattggttatccggtgtggaatacgggcttgcgcattctcgatgcgatgatgcatccggtgccgccgggtgtggcgggagatctctatctcaccggtattcaactggcgcaggggtatcttggacgacccgatctgaccgccagccgcttcattgccgatccttttgtccctggtgaacggatgtaccgtaccggagacgttgcccgctggctggataacggcgcggtggagtacctcgggcgcagtgacgatcagctaaaaattcgcgggcagcgtatcgaactgggcgaaatcgatcgcgtgatgcaggcgctgccggatgtcgaacaagccgttacccacgcctgtgtgattaaccaggcggcagccaccggtggtgatgcgcgtcagttggtgggctatctggtgtcgcaatcaggtctgccgttggataccagcgcattacaggcacagcttcgcgaaacattgccgccgcatatggcgccggtcgttctgctgcaacttccacagttacctcttagcgccaacggcaagctggatcgcaaagccttaccgttgcctgaacttaaggcacaaacgccggggcgtgcgccgaaagcgggcagtgaaacgattatcgctgcggcattcgcgtcgttgctgggttgtgacgtgcaggatgccgatgctgatttcttcgcgcttggcggtcattcgctactggcaatgaaactggcagcgcagttaagtcggcagtttgcccgtcaggtgacgccggggcaggtgatggtcgcgtcaaccgtcgccaaactggcaacgattattgatggtgaagaggacagctcccggcgcatgggattcgaaaccattctgccgttgcgtgaaggtaatggcccgacgctgttttgtttccatccggcatccggttttgcctggcagtttagcgtgctctcgcgttatctcgatccactatggtcgattatcggcattcagtcgccgcgccctcatggccccatgcagacagcgacgaacctggatgaagtctgcgaagcgcatctggcaacgttacttgaacaacaaccgcacggcccttattacctgctggggtattcccttggcggtacgctggcgcagggcattgcggcgcgactacgtgcccgtggcgaacaggtggcatttcttggcttgctggatacctggccgccagaaacgcaaaactggcaggaaaaagaagctaatggtctggacccggaagtgctggcggagattaaccgcgagcgcgaggcnttcctggcggcacagcagggaagtacttcaacggagttgtttaccaccattgaaggcaactacgctgatgctgtgcgcctgctgacgactgctcatagcgtaccgtttgacggaaaagcgacgctgtttgttgctgaacgtacgcttcaggaaggtatgagccccgaacgcgcctggtcgccgtggattgcggagctggatatctatcgtcaggattgtgcgcatgtggatattatctctccaggggcatttgaaaaaattgggccgattattcgcgcaacgctaaacagataaattaacattatctataaacccataattgcaggaaataattatgggtttatcatttatttaatttataagtttgctggttatttttcttaaatagagtgaatgttgcattcagtggaatgaatttacaaacttcagcttcggataattctcaccaactggtaaagtgagcgccgtggagatttccccctattggactcattttcaggttataccccatgtcatcactgaatattaaacagggaagtgacgctcattttcccgattatcctctggcgtcgcccagtaataatgaaattgatttacttaatctaatctcagttttatggcggnncanaannacggtcatggcggtcgtttttgcgtttgcctgtgcaggcttgctgatctctttcatcctgccgcaaaaatggaccagcgcggcggttgtcacgcctccagaacctgttcagtggcaagagttggagaaaacattcactaagcttcgtgtgctggatctggatatcaaaattgatcgtacagaagcatttaacctgtttatcaagaagtttcagtcggttagcttgctggaagagtacctgcgttcatcaccttatgtgatggaccaattaaaagaggcgaaaatcgacgaactggatttgcatcgcgcaattgtcgcattgagcgaaaaaatgaaagcggttgatgacaatgccagtaagaaaaaagatgaaccgtcactgtatacctcctggacgctaagttttaccgcgccaaccagtgaagaggcgcagaccgttttgagcgggtatatcgattatatctctgcgttggtggtgaaagagtcgatagaaaacgtccgtaataaactggagatcaaaacccagtttgaaaaagaaaaactggctcaggaccgcattaaaatgaaaaatcaacttgatgcaaacattcagcgcctcaattattcactcgacattgccaacgcggcaggaattaaaaagcccgtttacagtaatggtcaggccgttaaagatgaccccgatttctctatttctctcggcgcagagggtattgaacgcaaactggaaattgaaaaagcggtcactgacgttgcggaactgaacggtgaattacgtaatcgtcagtatcttgttgagcagttaacaaaagcaaatatcaacgatgtgaattttacgccgtttaaatatcagttaagcccgtcattgccagtgaaaaaagacggtccgggtaaggcgattattgtgatcctttccgcgctgatcggcgggatggtggcttgtggtagcgtgttattgcgctatgcgatggcatccagaaaacaggatgccatgatggcagaccacttagtttaactatttgcggttgaaggtgccgttcgtccgagcggcaccacgagcggcgttccggctaccggatcgtcaatgatcatgcagcggagaccataaatgcgctcaatcagttcagcagtgacaatctccttcggcgctccctgagcaacaattttcccttctcgcaatgcaatcaaatggctggcgtaacgacaggcctgattaagatcgtgcagcaccgccgccagggtatagcctttctcgcggttcagttcgcttaacagttccagcaaatcaatctgatgactgatatccagccaggtcgtgggttcgtcgagcagcataattgccgtttcctgggccagcaccatcgcgatccacgctcgctggcgttgcccaccggaaagggtatccacgctttgatctgcaagatgagttattcccgtggcctgcatcgctttcgttaccgcctcttcatcttctttgcgccaacgggtaaacagcggttgatgtggataacgcccacgcgccaccagctcctgcacggtgatatctcccagcgtggtggcattttgcgccaacagaccaatccgccgggcaacttctttactggcgtaatgttgaatgtgctcgccatccagccagacatgcccatgagcaggcgtcatcaggcggcttaaggtacgcagcaacgtggatttaccgcagccatttggcccgataattgccgtgaagtgaccatcaggtatttctacagtcagattttccgcaacggtatatttgccatatcccagggttaactgttcgccgcgcaaacgggctactgattcggtcattttttgcgagactcctgaattaacaaaacgataaggtaaataccgccgaggctgacggtaacgacgccaaccggaagttgatacggcataaacagttgttgggcgcagagatcggccgccagcagtaacagcgccccgcatagcgccgcctgggttagcccccagcgagcggtgccgctaatgcgtcgggcaatgtgcggcgcgactaaagcaataaaggaaatcggcccggcaagcgctgttgccgcagcggtaagcaccactgcaaccagcatcattaacagacgcgaacgttcgacgctgacgcccagcgcacacgcggtatcatcgcccatttccagcaagcgcatccggcgtaccagtaaggcggcggcaattagcatcaatataatgatgggtgcggaaggcgaggtttttgcccacgtcaggccgttgagcgatccggcattccacaaacctgctgttagcgccgtttctaaagacgctttcagcaacagccaggtattaaaggccaccagcatggcgcgaacgccgataccgataataatcaaccgaaaggtgtcgataccgttacgccaggcgagcagccagaccaacagcgaagtgataatgccgcccaccattgctgccagcgcgatagccgtcagatcctgaccaaacagcaccatcgccaccagcacgccgctccacgccccggtgttaaagcccattacgtcagggctgccgagtgggttacgcatcagcgactgaaaaatcgcaccgctgacgcccagtgccgcgccaatcaacagcgccatcagcacgcgtggtaaacgccattcggtgaccaccatcgtcatactgcgcggcgcatcgcccatcagcgcggcgaatacctgcgagatttccagcgtgacggcaccgctgcgtaatccccagatacctgcaaccacacaggcggaaatcagcagcaaacaggtgatgagtaatcggcgagagacgtaaatcatgcaccacctcgcgttttacgtcgcacgaggaagatcagcaccggtgcaccaataaacgcactgaccacagaaacgcgcagttcaccgggcacaatcacccgcccgatgatatcggcaaacagcagcagggcaggggtagcaagtagcgtgacgggcagcgaccagcgatgatcggcacccaccagccaacgcgccatatgcggcatcatcaggccaataaaggcaatagggccaactaccgccgtcgcactaccacaaagcacggtaatcgccagcagaccaatcaactgtgtgcgcgccacgcgactgcccagcgccgtcgcggtgtcgctgccaaggcttaaactgttcagcgcgcgactcagtaatagcgcagttgctccggcgatcagcactgggatcagcaccacttttaaggtatgtagattgcgaatatccagcgaaccggcttgccagaaacgcagttgatcgtagacgtcaggattaagcagggcgatgccgctggtcagcccttccagcaccgccgccagcgccacgcccgccagggttaaacgcaccggacttaactgcccaccgccctggctgccggtaaaggcaacaatcaacgaggccaccagcgccccggcgaaggccatcgccagttgttcctgtgcggaagagtaaccaaacagcgccgcacccagcacaatggcaaagctggctccggcgttcacgccaagcaagccggggtcggcaagtgggtttcgggtgagggtttgcattaacgccccggcaaggccaagcgcgccgcctgccagtaaaccggcaagggtacgcggcagccgcgcgtcgagcacgatggtgcagtcggcgctctggcaggtgccggagaaggcctccagcactacggaagcggggagtgattttgccccaatgagcaggcttaatgccgtcgcgataatcagtaataacagcaatccgggcacggcaatggcgcgtgtcacggcaacagaaccagacatacgaacttccatgataatgaaattaattatcgttatcgatcttatttggatatgttagcatgtgcagcctaagaataggtatttaaaatatttgatggcaaggcattgtaatgaataaacaatcctggctgcttaacctcagcctgttgaaaacgcacccggcgtttcgcgcagtattcctcgctcgtttcatctcaattgtgtctctgggtttgctcggcgtcgcggtgccggtgcagatccagatgatgacacattccacctggcaggtggggctttcggtgacgctgaccggcggcgcgatgtttgttggcctgatggtcggcggtgtgctggcggatcgctatgagcgcaaaaaagtgattttgctggcgcgcggcacctgtggcattggcttcattggactgtgcctgaacgcgctgctgccggagccgtcattgctggcaatctatttacttggtttatgggatggttttttcgcatcgcttggcgttacggcgctattggcggcgacaccagcactggtagggcgtgaaaacttaatgcaggccggggcgatcaccatgttgaccgtgcgtctggggtcggtgatttcgcccatgattggcggtttactgctggcgactggcggtgtggcctggaactacgggctggcggcggcgggcacgtttattaccttgctaccgttgttaagccttccggcactgccaccgccaccgcagccgcgtgagcatccgttgaaatcattactggcaggatttcgttttctactcgccagcccgctggtgggagggattgcgctgctgggtggtttattgacgatggcgagtgcggtgcgggtactgtatccggcgctggctgacaactggcagatgtcggcggcacagattggttttctntatgcggcgatcccgctcggcgcggctattggcgcgttaaccagcgggaagntggcgcanagcgcgcgaccagggttattgatgctgctctccacgctgggatcgttcctcgccattggtctgtttggcctgatgccgatgtggattttaggcgtggtttgtctggcgctgttcggctggttgagtgcggtcagctcgttgctgcaatacacaatgctgcaaacgcaaaccccggaagcgatgttagggcggattaacggtttgtggacggcacaaaacgtgacgggcgatgccataggcgcggcgctgctgggtggtttgggagcgatgatgacaccggttgcttccgcaagcgcgagcggttttggtttattgattatcggcgtgttgttattgctggtgctggtggagttgcgacgttttcgccagacgccgccgcaggtgacagcgtctgacggttaatgcttaaaacagcgccttaagtcgttccagcacttgcatggcgctgtagtaatccagacggaacgtctcggttcccagcgcataaacctgcttgttttgtactgcaggcaggtgcgcgagcagcggattagcataaatagcatcggcatctttctgatcaccggcgaacaggaatagtgactcgccatttaaccctgcagccagattttccccaccaagctgaatgatgtcatggcgtttaccctggctttggctggcatttaaccctgcgggtaacttcgccagcgtaaagccgagttgttccagcatctgcccttgtgctgattccggcgtccagagattggcactgtgtgcagcggcagtatagacaatggcagtgaccggctgcggcggtaatttgatttgctctttcgccgccgccagttgcttatcaaactgcgcaatccgctctgccgcttgtttctcatgcccggtaatttcgccaagttgcgttaacagcgcctgccagcttttgtcgtcgtaattgatgattaatgtcggggcgatggtggaaagctgatcatacagcgccagcgccgaatccccgccggttgcgctaattaaaatcagatcnggcatttgcgcggcaacggcttcggcgctcggttcgccgatatagagccgttgcagtttgcgttctttcgccaccttgctccactggcgtaaaaagccctggtcatccgcgacgcggttattcggcgtggtcgcgccgctggcgatcaccggagcatcaatcgccagcagtgagccggtcagggtgacgctggtggaaacaatacgctgcggctggctttccagggtatgagtgccacggctgtcagtaatctgacgcggccagtcggcggcctgaactgcggctattcctgaaaacaaaagtcctgttaatagaagggcattgcggtagancggggcgagtctcacaaatcagcctcctgttattaatgaagttaatgcttctcattttcattataaccacaaccagatgcaaccccgagttgcagattgcgttacctcaagagttgacatagtgcgcgtttgcttttaggttagcgaccgaaaatataaatgataatcattattaaagcctttatcattttgtggaggatgatatggatacgtcactggctgaggaagtacagcagaccatggcaacacttgcgcccaatcgctttttctttatgtcgccgtaccgcagttttacgacgtcaggatgtttcgcccgcttcgatgaaccggctgtgaacggggattcgcccgacagtcccttccagcaaaaactcgccgcgctgtttgccgatgccaaagcgcagggcatcaaaaatccggtgatggtcggggcgattcctttcgatccacgtcagccttcgtcgctgtatattcctgaatcctggcagtcgttctcccgtcaggaaaaacaagcttccgcacgccgtttcacccgcagccagtcgctgaacgtggtggaacgccaggcaattccggagcaaaccacgtttgaacagatggttgcccgcgccgccgcacttaccgccacgccgcaggtcgacaaagtggtgttgtcacggttgattgatatcaccactgacgccgccattgatagtggcgtattgctggaacggttgattgcgcaaaacccggttagttacaacttccatgtcccgctggcagatggtggcgttctgctgggggccagcccggaactgctgctacgtaaagacggtgagcgttttagctccattccgttagccggttccgcacgtcgtcagccggatgaagtgctcgatcgcgaagcgggtaatcgtctgctggcgtcagaaaaagatcgccatgaacatgaactggtgactcaggcgatgaaagaggtactgcgcgaacgcagtagtgagttacacgttccttcctctccacaattgattaccacgccgacgctgtggcatctcgcaactccctttgaaggtaaagcgaattcgcaagaaaacgcactgactctggcctgtctgctgcatccgacccccgcgctgagcggtttcccgcatcaggccgcgacccaggttattgctgaactggagccgttcgaccgcgaactgtttggcggcattgtgggttggtgtgacagcgaaggtaacggcgaatgggtggtgaccatccgctgcgcgaagctgcgggaaaatcaggtgcgtctgtttgccggagcggggattgtgcctgcgtcgtcaccgttgggtgagtggcgcgaaacaggcgtcaaactttctaccatgttgaacgtttttggattgcattaaggagcgaggatgagcattccattcacccgctggccggaagagtttgcccgtcgctatcgggaaaaaggntactggcaggatttgccactgactgacattctgactcgccacgctgcgagtgacagcatcgcggttatcgacggcgagcgacagttgagttaccgggagctgaatcaggcggcggataacctcgcgtgtagtttacgccgtcagggcattaaacctggtgaaaccgcgctggtacaactgggtaacgtcgctgaactttacattacctttttcgcgctgctgaaactgggcgttgcgccggtgctggcgttgttcagccatcagcgtagtgaactgaacgcctatgccagccagattgaacccgcattgctgattgccgatcgccaacatgcgctgtttagcggggatgatttcctcaacacatttgttgcagagcattcttccattcgcgtggtgcagctactcaacgacagcggtgagcataacttgcaggatgcgattaaccatccggcagacggttttactgctacgccgtcacctgcngatgaagtggtctatttccagctttccggcggcaccaccggtacaccgaagctgatcccgcgcactcataacgactactactacagcgtgcgtcgtagcgtcgagatttgtcagttcacacaacagacacgctacctgtgcgcgatcccggcggntcataactacgccatgagttcgccgggatcgctgggcgtctttcttgccggaggaacggttgttctggcggccgatcccagcgccacgctttgcttcccattgattgaaaaacatcagattaacgttaccgcgctggtgccnccggcagtcagcctgtggttgcaggcgctgaccgaaggcgaaagccgggcgcagcttgcctcgctgaaactgttacaggtcggtggcgcacgtctttctgccacgcttgcggcgcgtattcccgctgagattggttgccagttgcagcaggtgtttggtatggcggaagggctggtgaactatacccgtcttgatgatagcgcggagaaaattatccatacccagggttacccaatgtgtccggatgacgaagtatgggttgccgatgccgaaggaaatccactgccgcaaggggaagtcggacgactgatgacgcgcgggccgtataccttccgtggctattacaaaagcccgcagcacaatgccagcgcctttgatgccaacggtttttactgttccggcgatctgatctctattgatccagagggttacatcaccgtgcaggggngcgagaaagatcagatcaaccgtggcggcgagaagatcgctgccgaagagatcgaaaacctgttactgcgccatccggcggtgatctacgccgcactggtcagtatggaagatgagctgatgggcgaaaaaagctgtgcttatctggtggtaaaagagccgcttcgcgcggtgcaggtgcgtcgtttcctgcgtgaacagggtattgccgaatttaaattaccggatcgcgtggagtgtgtggattcacttccgctgacggcggtcgggaaagtcgataaaaaacaattacgtcagtggctggcgtcacgcgcatcagcctgaaggagagaacacgatggctattccaaaattacaggcttacgcactgccggagtctcacgatattccgcagaataaagttgactgggcctttgaaccgcaacgtgccgcgttgttaatccatgatatgcaggactattttgtcagcttctggggcgagaactgcccgatgatggagcaggtgatcgcgaatattgctgcgctgcgcgactactgcaaacagcacaatatcccggtttattacaccgcccagccgaaagagcagagcgatgaagatcgggcgctgttgaatgatatgtgggggccgggcctgacccgttcgccggaacagcaaaaggtggtggatcgactgacgccagatgccgacgacacggtgctggtgaagtggcgctacagcgcgtttcatcgttctccgctggagcaaatgctcaaagagagtggacgtaaccagctgattattaccggggtatatgcccacattggctgtatgaccaccgcaaccgacgcatttatgcgcgatattaaaccgtttatggtggcggatgcgctggccgatttcagccgtgacgagcatttgatgtcgctgaaatatgtggccggacgttctggccgggtggtgatgaccgaagaattactgccagcacctatccccgccagcaaagcggcgctgcgtgaggtgatcctgccgttgctggacgagtccgatgaaccgttcgatgacgacaacctgatcgactacggtctggattcggtgcgcatgatggcgctggcggcgcgctggcgcaaagtgcatggcgatatcgactttgtcatgttggcgaaaaacccgaccatcgacgcctggtggaagctactctcccgcgaggtgaaataatggatttcagcggtaaaaatgtctgggtaaccggcgcggggaaaggtatcggctacgccacggcgctggcgtttgttgaagcgggagcgaaagttacaggttttgatcaagcgttcgctcaggagcaatatccctttgcgaccgaagtaatggatgttgccgatgctgcgcaggtggcgcaggtatgtcagcgactgttagctgaaacggagcgactggacgtgctggtcaatgcggcgggaattttgcgcatgggcgcgaccgatcagctcagtaaggaggactggcagcagacttttgcggttaatgtcggcggtgcgtttaacctgttccagcaaaccatgaaccagtttcgccgtcagcggggcggggcgattgtcactgtggcgtccgacgccgcacacacgccgcgtattggtatgagtgcttatggcgcatcgaaagcggcgctgaaaagcctggcgttgagcgtcgggctggaactggcgggtagcggcgtgcgctgtaatgtggtttcgccgggttccaccgataccgatatgcaacgcacgctgtgggtgagcgatgacgccgaagaacagcgtattcgcggctttggcgagcagtttaaactcggcattccgctggggaaaatcgcccgtccacaagagatcgccaacacgattttgttcctcgcctctgacctcgccagccatatcaccctacaggatattgtggtcgatggcggctcaacgctgggggcataagcatgatctggaaacgccatttaacgctcgacgaactgaacgccaccagcgataacacaatggtggcgcatctgggaattgtgtatacccgtctgggcgatgatgtgctggaagccgaaatgccggttgatacccgtactcatcagccgtttggcctgctgcatggcggcgcgtcggcggcgctggctgaaacgctgggatcgatggccggatttatgatgacccgcgacgggcagtgtgtggtgggcacggaacttaacgccacacatcatcgcccggtgtctgaaggcaaggtacgcggcgtctgccagccgctgcatcttgggcggcaaaatcagagctgggaaatcgtcgttttcgatgaacaggggcggcgttgctgcacttgtcggctgggtacggcagttttgggatgaacccgacagaattatatgagattgcaggaaaactcggttaacggagtgatcgagttaacattgttaagttaaatattggtttcaactccgatttacatggttgctgtgttgttaaatcgtacaaagatgttatagaaacaaaatgtaacatctctatggacacgcacacggataacaactatgaacaaatcagggaaatacctcgtctggacagtgctctctgtaatgggagcatttgctctgggatatattgctttaaatcgtggggaacagatcaacgcgctgtggattgtggtggcgtcggtctgtatctatctgatcgcttaccgtttttatggtctgtatatcgccaaaaatgtgctggcggttgacccgacgcgtatgacgccagcggtgcgccataacgacgggctggactatgtgccgacggacaagaaagtgctgttcggtcaccattttgcggccattgccggagcaggtccgttggttgggccggtactggcggcgcaaatgggttacctgccagggatgatctggctactcgccggggtggttctcgccggtgcggtgcaggatttcatggtgctgtttgtttctacgcgccgtgacggtcgttcgctgggtgagctggtcaaagaagagatggggccaaccgccggggtgatcgcgctggtggcctgctttatgatcatggtcattatccttgcagtactggcgatgatcgtggtgaaagccctgactcatagcccgtggggaacgtataccgttgcgttcaccattccgctggcgctgttcatggggatctacctgcgctatctgcgtccggggcgtattggtgaagtgtcggtcatcggtctggtattcctgattttcgccattatttctggcggctgggtggcagaaagtccgacctgggcaccgtactttgactttaccggcgtgcagctgacctggatgctggtgggttacggttttgtggcggcggtgctgccggtatggttgctgctggctccgcgtgactacctctctaccttcctgaaaatcgggacgatcgttggtctggcggtaggcattttgattatgcgcccgacgctgaccatgcctgcgttgaccaaatttgttgacggcactggcccggtatggaccggtaacctgttcccgttcctgtttatcaccatcgcctgtggcgcggtgtctggcttccatgcgctgatctcttccggcaccacgccgaagatgctggcgaacgaagggcaggcttgttttatcggctacggtggaatgttaatggaatccttcgtggcgattatggcactggtttccgcctgtatcatcgatccgggcgtgtacttcgccatgaacagcccgatggcggtgctggctccggcagggacggcggatgtggtcgcttctgccgcgcaagtggtgagtagctggggctttgcgattactccggatacgctcaaccagattgccagcgaagtgggagaacagtcgatcatttcccgtgcgggcggtgcgccgacgttggcggtggggatggcctacattctgcatggcgcgctgggcggcatgatggatgtggcgttctggtatcacttcgccattctgtttgaagctctgtttattctgacggcggtggatgcaggtacgcgtgctgcgcgctttatgttgcaggatctgctgggcgtggtttctccgggcctgaaacggaccgattcactgcctgctaacctgctggcaacggcgctgtgcgtgctggcgtggggctacttcctgcatcagggtgtggtcgatccgctgggcggtattaacactctgtggccgctgtttggtattgccaaccagatgctggcagggatggcgctgatgctctgtgccgtggtgttgttcaagatgaaacgtcaacgttacgcctgggtggcgctggtaccaacggcctggctgctgatttgtaccctgaccgcaggctggcagaaagcgtttagcccggatgcgaaagtcggcttcctggccattgctaataagttccaggcaatgatcgacagcggtaatattccatcgcagtatactgagtcacagctggcgcaactggtgttcaacaaccgtctggatgccgggttaaccatcttctttatggtggtcgtggtggttctggcactgttctcgattaagacggcacttgcggcattgaaagagccgaagccaacggcgaaagaaacgccgtatgagccaatgccggaaaatgtcgaggagatcgtggtgcaggcaaaaggcgcgcactaaagtcagagtgaggggggatgttggcgaatgttggcatggcgccgtgggttccccctcaccctaaccctctccccgatggggcgaggggtctgaccgagcgcgttgatagcatttgtaggccggataaggcgttcacgccgcatccggcactctttcagcaacatggttagcggaggccaagatgtttgattcactggcaaaagccggaaaatatttaggtcaggcggcgaagctgatgattggtatgcctgattacgacaactatgtcgaacatatgcgggttaaccatcccgatcaaacgccgatgacctacgaagagtttttccgtgagcggcaggacgcgcgctacggtggaaaaggcggcgcgcgctgctgctaaatttgcacgtcaggctttaaacgattccactttttcgaacgctgcacgcaacgtatctggtgtcagcgtgactggcaggtaatgaatggantccaccgggcgcaaggtgtgggcaatcactttatcgatctccgcctgattattgatatccacttccagctccgccagcgtagtcggcagatgaaaacgctgatacgccccggttaattgcgccagcacatcatcctgacccagcaaggcgctttgcaccagaattccgtaggcgactttggtgccgtggagaaacttctcggtttgtggcaggacagtcagaccgttatgtacggcatgggccgccgctacacgcgtaaaacgatcgcccagaccaccgaccatcccaccaccagcaataatggcatccaccacatcgcaaaatgattgcgttaactgctgattttgctgatcggcaagcgcctgttcgctactgtttaacaagacgtcgcgaatggcctgcgcattattgatccccagtcgcacggttagcggcaacgtttctggttgcggagccagcaccaccgcttcataccatttcgccagcgtatcaccgatccccgccagcagatattgttgcggcgcattgaggataatctccggttccaccagcaccataaaattggcgtcgtcgaaaatctcataatgcagcgcctgtccggcatcgttataccagacggagagcggtgtccaggcggcgcaggtggcggcgatcgttggagcggcaacaaatggcagaccgagacggcgggcgagggctttcgcggtgtcgagtagtgcgccgccgccgacgccaatcaccacgctgcgatcgtcaccggactcagccgccagttgctgtacatcgctttcgctgcaatgaccacgaaacaaaatatgctttgcccctggaagtccaaacgctggcggaagtttggtttgcgccgcagcaatggcgcgtacgccgtagatccacaccgcgcgagaaagttgttcatcagtgaaaaaatcgtgcaggtgattgaaacttcctggatgtgaaaagtagttagccgggccgacgaccacgcggataggattgtgaggcatgttgtgttgtccttattgttttatttagacatctaaacgtcttgattgccaaatactagcatcgtgttatagtgccttcaacacgcaacttcgtcaggtacaataaaaatgacaaataaccctctgattccacaaagcaaacttccacaacttggcaccactattttcacccagatgagcgcgctggcgcagcaacaccaggcgattaacctgtcgcaaggctttcctgattttgatggtccgcgctatttacaggagcggctggcgtaccacgttgcccagggggcaaaccaatacgcgcccatgaccggcgggcaggccttgcgcgaggcgattgctcagaaaacggaacgtttgtatggctatcaaccagatgccgatagcgatatcaccgtaacggcaggggcgacggaagcgttatacgcggcgattaccgcactggtgcgcaatggcgatgaagtgatttgttttgatcccagctatgacagttacgcccccgccatcgcgctttctgggggaatagtgaagcgtatggcactgcaaccaccgcattttcgcgttgactggcaggaatttgccgcattgttaagcgagcgcaccagactggtgatcctcaacactccgcataatcccagtgcaactgtctggcagcaggctgatttcgccgctttgtggcnnnnnannnncgggcacgagatttttgtcattagcgatgaagtctacgagcacatcaacttttcacaacagggccatgccagtgtgctggcgcatccgcagctgcgtgagcgggcggtggcggtgtcatcgtttggcaagacctatcatatgaccggctggaaagtgggttattgtgttgcgccagcgcccatcagcgccgaaattcgcaaggtacatcagtatctgaccttttcggtgaataccccggcacagctggcaattgcggatatgctacgtgcagaacctgagcattatcttgcgttaccggacttttatcgccagaagcgcgatattctggtaaatgccttaaatgaaagtcggctggagattttaccgtgcgaaggcacatactttttgctggtggattacagcgcggtttctaccctggatgatgttgagttttgccagtggctgacgcgggagcacggcgtggcggcgattccgctatcggtgttttgcgccgatcccttcccacataaactgattcgtctctgttttgccaagaaggaatcgacgttgctggcagcagctgaacgactgcgccagctgtagttatttgacagtccaggcgcgggaatattgacggtcggcaaacagctcttgcagaccgttaatttgcttcaggcgcagcacttcgtcgctgtccattcccagctctttgccaattttattatcgtcccatcccaactgactgagttcacggacgatttccgacatggcggtgatttgatggcgtccacgagcgcgattatgacgaatagtcgcggcgatgcgttgattacgcgtaccttccagacaggtcaccggcaaataaccttttaagcgtaattttaatgatgatgagcctttaccaatttcatggcggtgaaaaccatccacgatttccagggcatttttatccgtatgcgtgaccacaatgggttgggtaaaaccatctatttcaatggattttttcagcagttttttttcgggtggtgccacgttgtttgggttgtaatcattaggcataagttggctgtttttaacccacagaacgcaatccactggctcttcacgaaaggggctaacctgatggatcgccatgcggatttcattaatcgcgttgatgcgatcatcttccggcaagctggcgagaaattgcgttaaatcctgcgttaatcgttgttgcatagtatcccccattcctgacgttttccttttatccgttcgttataacgctgatagttcttcgctttcgtaggactaaatgataatgcccgacaccagtaatcgttattgagtaaaactttgcatatccgccgccaggaggggatatctttcgcgccaatgtccccttgctgggtttgtggaacctcgatgccttttttctgataccagtgcaaataaatggcgattttattgcggtaatgctcagctgttttttccggcatgctattgagcagcaataatgcatattcttgccagtctaaatgttctggcttgaggattttccgatgcccatagaaatgattatcatgtccggcgtaaatgccgccactttttaccccgctgactcgtgcgcacatagcagcccagcgatccggttcgataacgtgatagagccataatccttgtcgttgctccgggccaaaaggttcgcaaattcgcatatgacgcagangaacgcctgcctgatacattaggttatacagtgggttgcagagactttgatgatttgcataccaggtccagatatcagccactttccagtcgtaaatggggtaaatgtaccagctatgaccgcctggtgcggccgtagtccagggtttatcgtcggcaaaacgttgtttanttaaactggcgatggcgacaaaacggttgtaggactcatccgcacggatgccgatcatcatcgccgccggacgtttttgtgaaaaccattcggcaaactcacgtacaaattgttcgaaggtcatgcctggctggtaaaagcagaaaaagtcaggatcggttatcgcatcttgcgggggctgacgcacccattcgacatcaggttcccagcactgccattcgggttggtattgtgaaagggaattttgcgtcgtaagcgggagcgcaacccagtaaaactcttcgatgacatcggtgtacaactcgcgcagggactgaacatagttaatggtgcaagagaattgcgcctcccagtcgataaacaaaacgcagatttttttgcccatttgtcgggcgagttcggctgtcagatgcagcattaaaccagagtctttgccgccagaaaatgagacacaaacgcggggtagggtgttgagtgtccaggtaatacgctctcgtgcagcttccagaatattgagcggaagaggaattttataaatagacatctgaagacgctctctgaacgttacagggtgatcagtgagataagactgttaattataaagtaaacactgaaaagcagagtgttttatttttcattcgcgctgtgaataaataggtgaaagtcatagtagctgtctgaggttatatatcaaaaacactcatttagacggtcaataaatcgtgagaacaccagattgtttaaagaagatttattataggaaatgtaaagctttattgaaggtaacggatgttctagttttatctcttttaaattaagaaagtcacggtgggagttataaagttcataggggactattcccagtaaatctgtaactgcaatgctattaatgattgtcagcaaagaggaaccacgaaatgaaattttgcgattcataaatctctcgtctatttccatttgaatatcatcaacccctgctgatttagatattaattgggtgaactcttctgccataatttgttcataagtgctattgtcagtaattcgtggatgcctattactacaaattagagtattgcgaatcgtatgcaatggcatgcaaatgacggaacggctgatcactggcatttgggtgatcaccagatcggctttgcggtgaaccaacagttcttcagcattctctgctgacatgaggatatcatggcactcaatctcgacagaggaatcttgccgtaggcagcggatcagcatactattattagagcaagaaatgagctgagggccgtgaataataaagtttttctttagttcggacttattgactatattaattgtttgttcaaggcctctgagatntttctcaagatggtgatgcagatttaaccctgttgtcgtcggcgcgataccttttcctgagcgaatgaataaagggtcattaaattgcgcacgtaagcgttgtaacgactggctcacggctgatggggtgatatatagtgattcagcagctttgctaatgcttaaatgctggtaaatacactcaaatatgacaagaagatttaagtcgaactttttcaagtcgtagagattggtcatacactactccggttatatttttcttccatgatatattcacttaatcaatgttttttgcgtatatatttttattgattatgttttttttgcttaactcaggattaagtttttctaaaatagcacagccacttagggcagagcgagcaattcatgcttttttaggatggttgaaaagcagggatatagttcaaccatccatgaattaccttttatttatttcccataatgatattaagcgttttctgatcgggcaaccccacggcctgttgcagcgtattttccttactcatgtaatagatagccggagtgacatttgcccccagatcgtccatgagtttctcgttgtcgcttaacactttcatttgctctgtacttacgtttgcaggcacgtttagcttaagcttgccaccagaggcttcatattcttgccaggtttttgcgggatctttggaggcaagaattgccgcggctgtcgccggactttctggtttgataaccccaaccaacaatgttctcaactgtactttgccagaatctacccacgggcgcgcctgctgccagaactgtttacaatatgggcagaacggatcggcgaagacgtagacaatgaccggcgcatcttttttaccgtcgaggagccagtgggattgttccatccgttgccacatttcgcgtccggctggtgcgtaaatttctttttcgataagtgtgttactcaggttttcacctttctcgttgtacatgtaaccagagatagcgtgcttaccatctggagtcaggtagatggtgacgcccatatcctgatactttccgagataacctttcattcctccgggggcatcgaacgttttgatgattgtaatgccctgtttttcaatcgcttttactggagcaggaagttcctctgcgaaggcgattgcaggaagcagagccagtaaaagtatcttttttaacattaatttgtccttttcagtcagtgcaaaagtcgagtaaaaggcataacctatcattgtcataggtaagagcttagatcaggtgattgccctttgtttatgagggtgttgtaatccatgtcgttgttgcatttgtaagagcaacaacgcagcctgcagactggcgctgaagataccaaagggtagttcagattacacggtcacctggaaagggggccattttactttttatcgccgctggcggtgcaaagttcacaaagttgtcttacgaaggttgtaaggtaaaacttatcgatttgataatggaaacgcattagccgaatcggtaaaaattggttaccttacatctcatcgaaaacacggaggaagtatagatgtccttgattaacaccaaaattaaaccttttaaaaaccaggcattcaaaaacggcgaattcatcgaaatcaccgaaaaagataccgaaggccgctggagcgtcttcttcttctacccggctgactttactttcgtatgcccgaccgaactgggtgacgttgctgaccactacgaagaactgcagaaactgggcgtagacgtatacgcagtatctaccgatactcacttcacccacaaagcatggcacagcagctctgaaaccatcgctaaaatcaaatatgcgatgatcggcgacccgactggcgccctgacccgtaacttcgacaacatgcgtgaagatgaaggtctggctgaccgtgcgaccttcgttgttgacccgcagggtatcatccaggcaatcgaagttaccgctgaaggcattggccgtgacgcgtctgacctgctgcgtaaaatcaaagcagcacagtacgtagcttctcacccaggtgaagtttgcccggctaaatggaaagaaggtgaagcaactctggctccgtctctggacctggttggtaaaatctaagttccgcaatcgcgtaattaatcgggtgctgcggcacccgattttcttccccgcaccatgatgcaagctgcatccaggtagccgcagaggccgcttgcatgatgatgtttaaagcccaggagataaacatgctcgacacaaatatgaaaactcaactcaaggcttcccttgagaaattgaccaagcctgttgagttaattgccacgctggatgacagcgctaaatcggcagaaatcaaggaactgttggctgaaatcgcagaactgtcagacaaagtcacctttaaagaagataacagcttgccggtgcgtaagccgtctttcctgatcaccaacccaggttctaaccaggggccacgttttgcaggctccccgctgggccacgagttcacctcgctggtactggcgttactgtggaccggtggtcatccgtcgaaagaagcgcagtctctgctggagcagattcgccatattgacggtgattttgaattcgaaacctattactcgctctcttgccataactgcccggacgtggtacaggcgctgaacctgatgagcgtattgaacccgcgcatcaagcacactgcaattgacggcggcaccttccagaacgagatcactgatcgtaacgtgatgggcgttccggcagtgttcgtgaacgggaaagagtttggtcagggccgcatgactttgactgaaatcgttgccaaaattgatacgggcgcggaaaaacgtgcggcagaagagctgaacaagcgtgatgcttatgacgtattaatcgtcggttccggcccggcgggtgcagcggcagcaatttactccgcacgtaaaggcatccgtaccggtctgatgggcgaacgttttggtggtcagatcctcgataccgttgatatcgaaaactacatttctgtaccgaagactgaagggcagaagctggcaggcgcactgaaagttcacgttgatgaatacgacgttgatgtgatcgacagccagagcgccagcaaactgatcccagcagcagttgaaggtggtctgcatcagattgaaacagcttctggcgcggtactgaaagcacgcagcattatcgtggcgaccggtgcaaaatggcgcaacatgaacgttccgggcgaagatcagtatcgcaccaaaggcgtgacctactgcccgcactgcgacggcccnctgtttaaaggtaaacgcgtagcggttatcggcggcggtaactccggcgtggaagcggcaattgacctggcgggtatcgttgagcacgtaacgctgctggaatttgcgccagaaatgaaagccgaccaggttctgcaggacaaactgcgcagcctgaaaaacgtcgacattattctgaatgcgcaaaccacggaagtgaaaggcgacggcagcaaagtcgttggtctggaatatcgagatcgtgtcagcggcgatattcacaacatcgaactggccggtattttcgtgcagattggtctgctgccgaacaccaactggctcgaaggcgcagtcgaacgtaaccgcatgggcgagattatcattgatgcgaaatgcgaaaccaacgtgaaaggcgtgttcgcagcgggtgactgtacgacggttccgtacaagcagatcatcatcgccactggcgaaggtgccaaagcctctctgagtgcttttgactacctgattcgcaccaaaactgcataagaagaagtaagattcacctgcaattgcttagccgccggggtcaaacctggcnnnnnttttatggcattaaaaagccctgccgggatgttccaggcagggcggcataaatacttttatctgttagcgaacgaccagtacaggcagattggcgtggcggatcacgctcgaggcgttagaacctaacagatgggtcgaaatcgatgggttgcgagaaccaataactacaacatcagcccccagttcttctgctaactcattgacttcatcccgcacgctaccaaaacggacatgttgtttaatgcgggaaggatcgatggtgaagtggctgaccatcgtttgcaaacgttcttctgcttcatgttgcagatgctcttcaaaacgacgcacatcagcggcaaaacggtgcaggctcaggctggctgacccgggtagtacgtgaagtagatgaataactccgtcatcctgggcgaggaattcagcgtggcgaacagctttgtcgctcaattccatttcaaatacatcaactggcataatgattgtcttatacataaccctttctccctgttaatcatgaacaaatcattcgccatgattataatatttatccctgatatttgtctggttctttttccttacgaactgtttctgtgatgaatatattctcactgaacaccaggaattctcccaaaacctgcggtaccgcccgttttcccgctgtgatagctacccttaaagactgactcttttttgaactgtctctggaggttgcatgaaagcattgacttatcacggcccacatcacgttcaggtagaaaatgttcccgatccgggcattgaacaggcagatgatattattctgcgtataacggcaacggcgatctgtggctctgacctccatctttatcgaggcaaaataccccaggttaaacatggcgatatttttggtcatgaatttatgggggaagtagttgaaaccggaaaggacgtaaaaaatttgcaaaaaggcgaccgggtggtaattccgttcgtcattgcttgtggcgactgttttttctgtcgactgcagcaatatgccgcctgcgaaaataccaatgcgggtaaaggcgctgcgctcaataaaaaacagataccagctcccgcggcattgtttggttatagtcacctgtatggtggcgttcctggtggacaggcggagtatgtccgtgtccctaaagggaatgtggggccgtttaaagtaccgcctttgctttcagatgataaagcccttttcctttctgatattctgccaacggcatggcaggcagcaaaaaatgcgcagatccaacaaggttcaagcgttgctgtctatggtgccggtcctgtgggattgttgacaatcgcctgtgcacggttgctcggtgcggaacagatttttgttgttgatcatcatccctaccgcttgcgtttcgccgctgaccgctacggcgcgatcccgattaatttcgatgaagatagcgatccggcacagtcaattattgaacaaacggcaggtcaccggggcgtggatgcagtaatagacgccgtcggttttgaagcgaaaggcagcaccacggaaacggtgctgactaacctgaaactggagggcagcagcggtaaagcgttgcgtcagtgtattgcggcggtcaggcgtggcggcattgttagcgtaccgggcgtctacgctggatttattcacggtttcctgtttggcgacgcctttgataaagggttgacgtttaaaatgggacagacccacgttcacgcatggctgggagaattattaccgttaattgagaaaggattactgaaaccagaagaaattgttacccactatatgccgtttgaagaggccgcccggggatatgagatctttgaaaagcgtgaagaggagtgccgtaaggtgattctggtacccggtgcacaaagcgcagaggcggcgcagaaggcggtttcaggtctggtgaatgcgatgccggggggaacaatatgagcgtcaggagtggttttcgaagtaaaggacagccatgacgataatcgccgccataatcagaaatcctatcaggatgtaaaatgcttctgccatggttattcccacaaacgaaacggaataattttgcagcaaaagtgaacagtgagaaccaggaaaaattgctgattttgcataaagaggatgcgagtgcatcctctgggcaaagcgagttatcgcttgtacagatgggattaaagcaggtagtcgccagcagcttctggctggtattcgagttccagcacttcaaggtgggttgcaacgccgcccggaagttcccagtgaatggaatcgccaacgcgcagtcccagcagtgcggcacctaccggagccataacggaaagctgagtattgctatcggtcatttttgccggatacaccagcgtgcgcacacgcacttcgccatcgctaagattgcggaatttaacccggctgttcattgtcaccacgtcgtgtggcatctcttctggcgaacacatttgggcgcgatccaactctgcgtttaacgcgtcggcgattggcaaaccagcataggcgggttgctccagcagaatatcgatgcgttcggcatccaggtcgttaatgatgatagttggtctggacatttttactccatgtcgtcggtactgcgagtgtcgcagataaacatacccaaaagaaaaccctcaccgtcaggcggcgagggtttaactcacatgatgatactgactgttgctcactctttgaagtgatttgcgtcacattcagggaattcctcaatgcagcgcattatgtataattcttaatcgtcatggtttatgaaagacgaattagcgtgttttgtaaatcagaggattaataacccgctttatcaatcacaaaggttttgccacagttacctgggtgtggttgtggcaagaatgagtttgcagaaagcggagcgttgatggcgtcagctttgatcgagacctgaatttcagtcaaatacgcagggttaccctggcacgttagcttaactgctttcacgttctcttttccccagcttttggcaaaggcggcgtcaaagtcacggcggctcactgttttaccgtaattatccgcaaggaattttccggcttcgctctcttttatctcttgattcaggcgtaccatcgtaccgaagtatgcgtccggatcaaaaccaaagcaggcaccgtgtttggcatattcgtagcgttccaggcaggaacgtccgccagctcctggcatgacttcacttagtttagcggccgtttccagtgataatccggtttccggcgatgaacacatccggctggcgcgcgcttctggtagattcgggattgggcgagtagcgcaaccgaagcgcatccagcggcgttcatcaacaccacgggcagcaaccgatttaggcaatcntggccacagaccatgtacggtcagaaaatcagctttgttggtcgtttcggtttgcaggcgacattcatctcgttcgttacgatttcgatcgtgttgactctggcaaaatccggtttgccaggagagggccaggacatagcgatcaaaatcgccatactgttttgcctgcaacgctacggcgttggcagaagagaagggaagcagagaaaccgcgagcaacgcggcgttacgccagaatgctttcataatgggtgtggaactcatacatacactgaatactatctattaaatcataaaaaagcccgccaggtgggctaacctggcgggcgtgatgatttattcagcgtttggcgaacgtattagttccacatggcgagaatcggccagccaaccaacagcaacatagagatgtaaatcaccccgaagattgcgccaagacgccagtaatcttttgatttcacatagccacagccgtaaataatcaccccaggaccggttgcatacggcgtcagacagcccatgataccgatagacagcaccagcaggatacacagttgttccattggtacgcccggaatacntttaccgacggccagaataaccggcagcatggttgcggtgtgcgcagacaggctggcaaacaggtagtgtgcaaagtagaacaccagaaccagtacaatcaccgttgcgtttggtgagaatccttccaggtgcgtactcatggtaccggcgaaccagtcaataaaaccagaacgagtcaggccgttagccatcacaaccagagttgccaggttgaccagcgtgttccatgcgctgttatagcgggtaatgtctttccacggcacaacgtgcagagccagcattagcgaaactgccagcagaccaaccgcagtagcattaatgacttcactgccaaatacccacaaacctaagctgagcaatacaaggccaatcagcgtccactctctgcgtgtcagcgcacccatggtttttagttcatcacccgcccaggttgccacttcttcactgtgtgtgatttccggtttgtacagcacgtaggaaagccacggcgcaatgataagcaagataaccccaaccggcaggaagcagaggaaccactgcaaccagctaatctggataccggcaattttgctgacgaactccagacccagcacgtttggtgccgcaccggtgacaaacatggacgaactcagactggtactaatgaccatcatccacatcaaatagccgccaatacgacgcgcggacggatcgttcgggaatgatttaaacaacggcggcaggtttttaatgaccggaaaaaccgtacccccggtacgcgcggtgttggacggtgtaaacggtgccagcagaatgtcgataatgacaatcgcataacccaacgtcagcgtgcgtttgcccatgaatttcacctggaaaagggcaatgcgacgacctaacccggaaacttcataccctaatgcaaaaataaatgcgccaaataccagccataccgtggtgctggaaaaaccagccaggccccatttcagcgcctgtttttgcgcattaaacgctgggtcagctaattctttggcatcaaagagcaggtaattactgccaataacgcaaatagtaaccgcaataaaactgatcgctgttgccggaattggctcgaggatcatgccgacaatcattgccacaaacacagcgaagtaatgccatgcctgcggcggcataccgtcggggacagggataagaaacatgacacccatcaccaccagtggggccaatagtttccatatattatcttttgctaaagacatacgggttctccgaaaattaatatttccaaatttatcaagtgcttaaataattaaatctgtgctaaaaaccaggtaaggatcagcaggtcggcactgccgcctggactgagatttcgttcgatacactccctgtcgaactgccggagataatcgagatctgcgggggttcgaatgccccctttttgcaataatgtttgcgcctcgcgctgtagccagcgcaggcccccctcgccaccgcgcgaagcaacgttggtatcgccgttgatcgccatcagtaggagcaaggtatcgagcaatgccagttcaggatctaacccctgatccagcagagtgaggtaatgtggcaaggcgtggttgatcaccagtggataacccgcttcggcttcaccgcgtgcgccggtaaggccaagctgctggtacaaccgttgacctgccgtcagttgtgaattattggtacgcagttcgcgatcggtcaggccacggcagaaacttgccgccgtagaacaaacggttgttggcgttagcaactggttgagctgaagcaaacggccaattgccgcacacagtagccctaaagaaaaaatgctgcccttatgcgtgtttacgcccgcggtggcgcggaacatatcaccttcgcaagccataccaattgggcgtaatccgtggagtaccgcttctggtgccatttccgcactacaggcaccaaattcaatgaaacggggtagccagccctgaatcgccagcgcgctgcggtggaaatcttccagcgccatatctttatgcgcaccgcagttaatgcgatccacgagacctggtttcggtgacagattgacttcagtcagcatggcgcgccagcccagcagggcgtactcatcgattaatgacgtcgcaagctttgtggttttagttaacgttgcaggcatcgacatcgttcagcagtgcctccatgcggttgagtaaatcggtcagttgatggttttttccacgcgcgcagacggctgcgctttgctcgcacaacaggcagcggcgaggcggcagtgaatagtcgcggcgggagagaatttcgccttcgggcgtcaggacatcgatatcccataaccgcccgagaggatgantatgttcaagctcaatggtggcgagcttgaggtcgcgagccggggcggcaatgctcaacataccctccggcccgctggcggaaaccagtgcagcctgctcctgaatttgccagccctgttttgcggctaaggcacgcaaggctgtcacgccatgattaaaaattcggcgtgtgacctcactgtctttaatcggcccaggcgcaaccacggtaaaggagaccagtggaacaggatggcgcttgagccagacgtgttgccgtgcttgcctttcatcccggctgacgagcagctcgggaattgacaccgcatggtggctggcgagttcaggaagcaggtgcatggcttattccttcacctgatgcacaacatcgatcaccgagccatcgcggtaacgcacaacggcaacgacgcggtcggtgaattcaatcggctgtggttcaccggtcagcagacgcgcacgttcgcgcagccactcaatggaaaccactttaatgcccgcttcctgcagacgttctgccagttccggacgtgccgggttaactgcgataccgtggtctgtgaccagaatatcgacactggagcccggggtgatgcaggtcagcacgttatccaccagagtcggaatacgaccgcgtaccagcggcgcgacgatgatggaaagcgcagaggcaatcgcggtatcgcagtgaccaccggaagcaccacgcagtacgccgtcagagccggtcagcacgttaacgttgaactgggtgtcaatttccagcgcgctcagtaccaccacgtcgagacgatcaaccgatgcacctttcgaaccccagttagcgtactggttggcgctgatttcgatgtgattggggttacgggccagcgattgcgcagcgtggctgtcaaagctctgtacatccagcagtttgcggatcagacctttttcgtgcagatcaaccatcgtcgcggtaataccaccgagggcgaagtcggcgcgaatatcgcggctacgcattttgtcttccaggaaacgggttaccgccagcgatgcgccgccggtgccggtttgcatggagaaaccttctttgaagtagcctgagttgacaatcacatccgcagcgctacgggcaataagcagttcgcgcgggttagtggtcatacgggtagcaccagcgccgatttttgcagcatcgccaacgcgatcaactttgacgattaaatcaacctgatcttgctcaatgcttgccggattatgcggataaggcagcagttcttcggtaagcatcacaacctgttttgcgttgtcggcatcaaccattgcatagccgagggagccgcagcaggctttaccggtgtagccgttggcattaccgaattcatcacaggacgggacgccgaggaaagccacgtcgatattcagttcgccgctctgtaccagatgcacacgtccgccgtgagagtggatttgcaccggttccgccagcagaccacgggagatctcttccgccagtggaccacgcaggccggaggtataaatgcgggtaaccacgccctggcgaatgtgttctaccagcggcgcatggcaatcactcagggagctggacgccagggtcaggtttttaaagcccatcttcgcgatgacgtccatcaccatattgacggtcaggtcaccgccacggaaagcgtgatggaaggaaaccgtcatgccgtcctgtaaaccagagcgacgaatcgcttcttccaggttggcgcacagtttgcgatcgcgcgctttttcagcctggtaggtttgctttggtgagttctggaaagcggcaagatcgcattcagcgcgacgattccaggccgctacccgttcttgtcgttgagattgttcaattttctgcgtcattttgattgccttattcttcgcggatgccggaaagttctgcacgggagancaccagacgggcgcgatcgataaccggaccgtccaccatcttgccgttcagggaaaccacgccgaggccttcgcgagcggcggcttcagcggcttctacgacgcggcgggcgtgatccacttctttctgggtcggtgcgtanaggttgtgcagcagatcaatctgacgcgggttgatcagcgatttgccgtcaaagcccagctgtttgatgtgggcggcttcttgcaggaatccggcttcgttgttagcgtcggaatagacggtatcgaacgcctgaatacccgcagagcgcgcggcctgcaaaatggaacagcgtgcgaacagcagttcagttccttccggggagcgttctgtacgcaggttgcgcacatagtcttctgcaccgagggcgataccgatcaaacgctcggaagcgtgagcgatttccactgcgcgggtaatgcccagcggagattcaatcgccgccagcaggccggtgctgccgggttcacgaccacaggctttttctatacgcaggatctctttttcgatatccagaacatcctgagcggtatcggttttcggcagacgtacaacgtccgcaccaccgcgaacgacggcttccaggtcgttaacaccccattcggaatccagcgcgtttacacgcacaatggtttcaatatcgcgatacagcggatgttgcagcgcgtgataaaccatgcggcgggcggtgtctttttcacgtaatgccacggagtcttcgaggtcaaacatcagggcatcagccgggtagatgaaggagttgctgaccatcgcggcattggcaccaggcacaaacaacatgctgcggcgggtgcgagttttacgttgttgcagcgaagcggaaatcattggcaatcctcccatggcagagccgggataccgctggcgcgtgccagcagggcttccagtcgtgcacgtaaaatgcagtccagtgcgcctttatcatcgacattcagctgtacgccgcgcacgttgtagcgggcgagaacgtccagaatggtggtgcgaattgcatcgccaaactgtttctcaacgctgctattgatttgcaggtcgatatcctgcgtatcgagtggggcgatgcgtatcatcacatccccagactcaagggtgcctgcaacggcgggctggtttattttcatttttcacctgtttctcatgcgggggtcttttgacgagctgccgcgtcctggcgggagtgctcaagcaggttctgcaaataatgcagcgtgactgcagggaccagcggcgcgatagccgtgagatcgtttttcgccagcagttgacgtacccgggaagcggatatcggcatctcctggtaacgcagccgctcaatttcaaccagttcgatgggcgctgcggagatagtcggcgtttccagccagtagcgcatatcctggttgtactgggcggtaacgcgacaaaagggttcagtaccgacaaagcggtgagttacacccagcgcgggagcgaggtactgacggaaaatcttcagatcaatttcggtgtaacaatggttaatgacgctctgttctttaatgaagtagcaagggaacgtagcgcgggagatgatgtattcggagccgcgatgcacagtcaggcgtggaatatcggcggtgccttttaacaccagatccagccggtcttcataggggaagcgtgaagaatcttctttgactaaaaacagatgcaaccagtcgcactgtgccgcagcttgttgaatcagataacggtgaccattcgtaaagggattggcgttcatcgcaatgcagccaatcttgttccctggatgacgaaattttttcagcgattcggcatagcgtttcagtcgcgtggcgctgttttccatcagcaccatcacgccgggtacgctggtcagcgtggaaaaaccgcactggcggaacagcgcctcgtattcggttttggtataaataaacagatgcgtgctgtgccgctcataggcgaggtttatcagttcagtggctaatgtcagcgccagtccttcaccgcgaacggattcactgatagcaacgcatttaataatatttccggcaattccaccgcacgcgataagcttttcatcgcgggttacggtaataaatacttcgactgtggtgtcaacgctcaaatcattttcatgcaggaattgggcgatttccgccatttttttattttctgaacgttttacgcgggtgaaaatatcattgccgaacataataaatagtatcctgaaggtgcatgttgttatcgatttgcaacgaatgttgttcaatgttgcaaactgataaccttttattttcacttgggagaaaggggggtgatcgaggtatatctttttctcctttcgctatacatcctaaggagtatttcggcgtgaaattttgatttatttcacatagagttagtggttttnnnnttatttaatggttttaagttttttaattaatgtaattacgaaatgactcgcaggtttaagtgatttaattgatttaatgaataaaatttgccacgatcataattaatatctatgtattttgattcaacattttaattacatccgtcaaagaggctcgggacaacccgcaaggaaaacaatgttgcagcttaacgagaataaacagtttgcatttttccaaagactggcatttccgctgcgtatctttttgctgattctggtgttctcaatatttgtcattgcagccctggcgcaatattttacggccagttttgaggactatttaacgcttcatgtacgcgacatggcaatgaatcaggcgaaaattattgcctccaatgacagtgtcatctctgcggtgaaaacgcgtgactacaaacggctggcgaccatcgctaacaaattacaaagagataccgattttgattatgtggtgattggggaccggcactcgatccgcctttaccatcctaatccggagaaaattggttatcctatgcagttcaccaaacagggcgcgctggagaaaggggagagctacttcattaccgggaaagggtcaatggggatggcgatgcgcgccaaaacgccaatctttgatgacgatggaaaagtcatcggcgtggtgtcgattggctacctggtgagtaaaatcgatagctggcgggctgagtttttattaccgatggcaggcgtgtttgtcgtgctgttagggattctgatgttgctgtcgtggttcctggcagcgcatatccgtcggcaaatgatgggcatggagccaaagcaaatcgcacgcgtggtccgtcagcaagaggcgctgtttagttcggtttatgaagggctgattgcggtggatccgcatggttacattaccgccatcaatcgtaacgcaagaaagatgctggggctgagctctcccggacggcaatggttgggtaaacccattgctgaagtggtcaggcccgccgatttctttaccgaacagattgatgaaaaacgtcaggatgtggtggctaactttaacggtctgagcgttattgccaatcgggaagctattcgttcaggtgatgatttgctgggggccattatcagctttcgcagtaaagacgaaatttccaccctcaatgcgcaactgacgcaaataaaacaatacgttgagagccttcgtacattgcgacacgagcatctcaattggatgtcgacgctcaatggtctgttgcagatgaaagagtatgatcgcgtgctggcgatggtgcagggggagtctcaggcccagcaacagcttattgacagcctgcgcgaggcgtttgccgatcgccaggtggcggggctgctttttggtaaagtgcagcgcgcccgggaactggggctaaaaatgatcattgtccccggtagccagctttcgcaactgccgccaggactggatagcaccgagtttgcagccattgtgggcaatttacttgataacgccttcgaagccagcctgcgtagcgatgaaggaaacaagatcgttgaattattcctcagcgatgaaggcgatgatgtggtgattgaagtcgccgatcagggctgcggcgttccagagtctctacgagacaaaanatttgagcagggggtcagtacgcgtgctgacgagcccggtgaacatggcattgggttgtacttgattgccagctacgtaacgcgctgcggtggtgttatcactctcgaagataatgatccctgcggtaccttattttcaatctatattccgaaagtgaaaccaaatgacagctccattaaccctattgatcgttgaggacgaaacgccgctggcagagatgcatgctgaatatattcgtcacattcccggattcagtcagatattactggcgggaaacctggcgcaggcccgaatgatgatcgagcgttttaagtcggggctaatcttgctcaataactatcttcctgacggtagagggattaatttactgcatgaactggtgcaggcgcattatcccggcgacgtggtgtttaccactgcagccagcgatatggaaacggtgtctgaagccgtacgttgtggtgtatttgattatctcattaagcccattgcctatgaacggctggggcaaacgctaacccgtttccgccagcgtaaacatatgctggaaagtattgatagcgccagccagaagcaaattgatgagatgtttaatgcctatgctcgcggtgaacccaaagacgaactgccgaccggcattgaccccttgacgctaaacgcggtgcgaaaactgtttaaagagcctggtgtgcaacatacggcagaaacggtggcgcaggcactgaccatcagtcgcaccactgccaggcgttatcttgaatattgcgccagccgccatctgattattgctgaaattgttcacggcaaagttggcagaccgcaacgcatataccacagtgggtgacatgataaagccggaggaaacttgcctccggcattactatttacttgcctgtgaccgctgctgccgttcctggcaccatcagctctgtagcaacgataacaatcaccaaaccaacaagcaccggtaccgaggtgcgttttacgacttcaaacggcgngnnnnncgccatcccggcaaccgcaacgactacgccagaaacgggcgaaagggtacggcccaggtttgacgcctgcagcatcgggatagtcaaatacgccgggttaatgccggaagagtgcgccagtttcgggatcatctcaacaaacgcataaaacggcgcattgcctgaaccggtcgtgactgccgccagcattgtcagaatcaccaataccagcatcaggatgatactcgccgaaccaaacgaggtagcgatagaaatcagactttgaataaagccgatggtgctaagcccctgagcgaataccccagcggcaaccagcagcatcaccacgttagcaaacgcatctgccatcccgcgataagccacttccagaccagagaaaactttctgggtattaaagctgcggaggaactccagaatggaggcaatcagcatacaaatcaccagaatagtgatgatgtgtaattgcggaccccatttaccgtcaaaaatcagtacaccgatgatcggcgtgaacggcaaaatggcataaaacgcaggggcagtggtggtgatttcactgacatctaacatttcatgagagatgtgctcttttttatccagataacgttgccagaagaagtgggcgatcgccatgccgataattgcagcaattgagataggcagcgtcgttttgaaggcgaagtcaatcagcgacatttcggaagcttgcgccgccagcaccacatcccctgaagtcggtgcgagaataatcgccgccggggaggcacaaatggcagcagctgcgccacgactgataccaacgtttaccatcaccggaaatagggttgccatcagcaaaacacccagaccggttgcggaagagacggccagagacatcagacaggcgacaaaataggcggcaatcatcagcaggtaaggggagttaatatactgcaatggttttgacgccagcttgaccaccatatcattcgcgccgatatgggtcatgtaagcggcaaatccacacagcatcataatcatcatgccgaggtcgccgccgcggctcattagtaatattttaacgtattcaacgatatccgtggcgctgtagcctgttgaagcctggctggacggtaacactttgtgccccataatggcactgataatcagcaataacaggccaccgacaaataacacaccagtggcggaataccctttaatgatgtagcgagctacacccacaataaccacaaccccaataaggagttcaatgaatgtcagcataatttttcctgtctccaggccccaaagtaaataataaaaaattcctaaagcttaaggaaaaaatatgcccaataaattggcgatgaatgctgattaaaatcaagaaaaactgccattaagacattgaagttgctgtttttatacgtagataacaaaacgcatatttagcggttggcaattatcacataataatgtgtgtaaattgatggaggattgatgcaaatttgttaattgcaatggtgttagctgcggttgcgtgctcaaaaaataatctgcaatgggcgtgggttgacgatatataatatattccctgttaagatgatttttggtatcttannnnaaaataagtcattttttcttggttgcattttgttatcagaaacaactagctttttcttttatgactattcccatcgcagaaaacgatgtgtcattttaaatcgatgcgcggaaatatttaacttgaacaagcggaaataaatagagcagctattcagattattctttatgttggggctattaaggttatgttaattgtagctttgctatgctagtagtagatttttgataaatgttttatggtcacaaatgaacgtgagtaaatatgtcgctatcttttcctttgtttttattcagttaatcagcgttggtaaagtttttgctaacgcagatgagtggatgacaacgtttagagaaaatattgtacaaacctggcaacagcctgaacattatgatttatatattcctgccatcacctggcatgcacgtttcgcttacgacaaagaaaaaaccgatcgctataacgagcgaccgtggggtggcggttttggcctgtcgcgttgggatgaaaaaggaaactggcatggcctgtatgccatggcatttaaggactcgtggaacaaatgggaaccgattgccggatacggatgggaaagtacctggcgaccgctggcggatgaaaattttcatttaggtctgggattcaccgctggcgtaacggcacgcgataactggaattacatccctctcccggttctactgccattggcctccgtgggttatggcccagttacttttcagatgacctacattccgggtacctacaacaatggcaatgtgtactttgcctggatgcgctttcagttttgagacaaatgaagttttagtaacttctttaaaatcaataactaaaataagtaacatcaaaaataacgcgatttttatcactttttagtaaagttgcactggacaaagcgtaccacaattggtgtactggtaaccgacacagcatttgtgtctatttttcatgtaaaggtaattttgatgtctaagattaaaggtaacgttaagtggtttaatgagtccaaaggattcggtttcattactccggaagacggcagcaaagacgtgttcgtacacttctctgcaatccagactaatggttttaaaactcttgctgaaggtcagcgcgtagagttcgaaatcactaacggtgccaaaggcccttctgctgcaaacgtaatcgctctgtaagatacgtcagcaagaattcaaaacccgcttaatcagcgggtttttttngtctttagtgtgcggttgaggccgaaaacagccagaatgccagtgcggtcatggcaaaagaccccagaaggttgacgaaaacgttcagtaatgcccagccaaagcggccctcttgtaacaaaaacaccacttctgccgaaaatgttgagaaggttgttagaccgccacaaaatccggtggtgattaatactttccacactggatcaatgttcgtcatcctgctgaaccaggcgaatcccattcctatgatgaatgccccaatcaggtttgctgccagcgtccccaacggaatcgcctgatgcagcgggttaaatcgcatacttaacagccatctcgccacgcttcccgtaccaccgccaataaaaactgctaaaagaagttgtaacactgcaaaatcctgctatttgatttgtatgagtgataagtgtaacgccgaataatcgtcgttggcgaattttacgactctgacaggaggtggcaatgctggttgctgcaggacagtttgctgttacatctgtgtgggaaaagaacgctgagatttgtgcctcgttgatggcgcaggcggcggaaaacgacgtatcgctgtttgtcctgccggaagcattgctggcgcgcgatgatcatgatgcagatctatcggttaaatcagcacagctgctggaaggcgaattcctcggacgtttacggcgagaaagtaaacgtaacatgatgacgacaattctgacgattcatgttccttcancgccggggcncgcatggaatatgctggtggcgctacaggcaggaaacatcgtcgcccgttatgccaaattgcatctctatgatgcatttgccattcaggaatcacgccgtgttgatgctggtaatgaaatcgctccgttactcgaggtggaggggatgaagntcgntctgatgacctgttatgacttacgctttccagagctggcgctggcacaggcattacagggagctgaaatcctggtacttcctgccgcctgggttcgcgggccgctcaaagagcaccactggtcaacgttgcttgccgctcgtgcgctggataccacctgttatatggtggcggcgggggagtgcgggaacaaaaatatcgggcaaagccggattatagatccctttggcgtcaccattgcggcagcgtcagaaatgcctgcactcattatggcggaagtgacgcccgaacgtgtgcgtcaggtgcgcgcgcaactgcccgtcttaaacaaccgtcgctttgcgccgccgcaattattatgatgtttttttactcggcgcttgattcaccttgttacagattgctattgtgtgcgcgcgtcgaatgaccgttaatattctttggtttttaaggcgcgttctgttgccggttatatgtcaagaaggtatctatgggtgagattagtattaccaaactgctggtagttgcggcgctggtcgttctgctgtttgggactaagaagttacgtacgctgggcggagaccttggagcggccattaaagggttcaagaaggcgatgaatgatgacgatgctgcggcgaaaaaaggcgcagacgttgatcttcaggctgaaaagctctctcataaagagtgacgtggcgagcaggacgctccctcaatatcttgttcgatacaaaaaacccgcttcaaaaagngggttttttatcagacagatgtaagtaattattacaggattacttaacttccatccctttcgcctgcaaatcggcgtggtaagaagagcggacaaacggaccgcatgcagcatgggtaaagcccatcgccagcgcttcggctttcatttcgtcgaactcatccgggctaacgtaacgttgaaccggcaggtgatggcggcttggctgcaaatattgccccagcgttaacatcgtcacaccatgacggcgcaggtcgcgcattacctcaataatttnttcattggtttcacccagacccaccatcagaccagacttggtcgggatttccggatgcgcttctttaaagcgttccagcagcttcagcgaccagttgtaatntgcgccaggccgtacctgccggtaaatacgcggtacgttttccaggttatggttgaacacatctgggggcgttgcagtcagaatatccagagcacgatccatacgaccgcggaaatccggcaccagagtttcaattttgatttgcgggcttttttcccgaatggcagtaatacaatccgcaaagtgttgggcaccgccatcgcgcaggtcatcacggtcaacggaggtgataaccacataacgcagcgccatatcggcaatggtctgcgccagtttcactggctcattggcatcaggagctaccgggcgaccgtgggcaacgtcacagaacggacaacggcgggtacaaatagcgcccaggatcataaacgttgctgtgccgtggttgaagcattccgccaggttagggcaggaggcttcctcgcagacagaatgcaggccatttttgcgcattgcggctttgatgccctggatacgtgtagagtccgctggaagcttgattttcatccattccggcttgcgcagcagggcttcgcgctctgttgccacgtttttaaccgggataagggccatcttatcggcatcgcggtatttaacaccgcgttccatcacaatgggtttactcatagcgtgcgtgttccagttgcgaattacgaaggaaagcgtttcaattcaatagattgttgtaattatcaactatttttgaattaacgactggcagtatatcattgaaacggacctgaaagcagccaaagcggtcgcgaaaatgtaaaattgttgttggattgtgccattttatcgttctgcgctgtgatctggctgtaacaatactttttcaaaatgcattacggataacatctattactccgtgcaggatgggatcacgcaggctgaatttgttgtagtggatagagaaatctatttgctcctcatttaaggacggaaaaggcagtttttccagcggccagcaacggctaaacaggttataaaaacggctgggaataatcgctaacatgtcactgttggcaaccagtgcagcgattgtcaaaatgttgtagctggtgaagctgatctgccggtccggaaacatctcttgaattctctgccgcagaccgctgaaattttgtccttccggtaacaggagtacatgtgcagcgttgtcgatagtctctctgtcatcttctaaagagagtagtggatttccctcgcggcaaattaacaccatattgtcggtgaacagaacatgatgttgcaccgtacgattggtgcaaaacatgttatctatgatgagatcggtttgaaactgactgagttggttttccgcgtcgctgatgggcgggttgcgcagtaaaagctgcggatagtgagttttaatcgcccgataaatgacaggaaggaccagagctccgaccgagggggtggtcgcaatagttatcgttcgttgcttatcatagcttccttcgatatccagcgcgccaagaatggactcaaggccctgactgatatactcatgtagatgcatcgcaaatgcggtaggagtgacaccctggcctttgcgaataaacaatgggtcagggaatataacgcgcagtttctgaatagactgactgattgccgagggggtcagattaagcactttcgctgcattaacgatccctttatgtacatatacagcttcaaaaatagtcagaagattaagatcaatatttcgtaaggttgtaaatatttgtggtttaccttctgacgattttctgcttaaacaggattcaatttgattattactatccacgcacttactccaattttattcatggnnnnnnnnnnnnnnnnnnaattacaataatcttatgtctaattggaacggaacgcttttgctcatcataatcaactatttcaataagttaatcaatggggtgagttacggagcaaggcgtagcatcgcatttctgcaagtgataaagaaaatatacaaacgcgaaggagatgtaaagcattagcaggtgttatgagtaatgacccagtgtaaattgggccattgaggtatgaaattaagcggtaatatattcgaagtcaggattgtttagtagcgctaaaatattttccagtaaacgtggtgcaatattattagtcgtcgcttcgggtttccattgtgatattttagccatttccattccggcatacccacaaggattaatacgtaaaaatggtgaaagatccatattgacgtttaatgccagaccgtggaatgaacaaccgcgtcgaatacgtaaacccagtgagcaaattttcttttccccaacatagacacctggcgcgtcagcccgaggatgcgcttctatacccagttcagccagggtattcaccactgtttgctcaagcaaggtcaccagttcacgcacaccgagtttacggcgtttcaggttaagcaatacatacatcacctgttgccccggcccgtgataagtcacctgcccaccgcgatcgctctgaatcaccggaatatcaccgggcattaaaatgtgctccgcctttcctgcctgcccttgggtgaataccggatagtgctcgaccagccagatttcatcaagggtactatcatcgcgggtatcggtgaattcatgcatagcctgggagattggctcgtaaggctgaagaccgagctggcggacaagaattttatcctgatacaaaacggcatctccgtggagaatgagtaaaagtgggagaaaagtatatcacagcgaggagaggggagttacccgaccaggggccgggtaacggagaagcgagttacagaaccatgcggacaatatcgattttgcccagttcttcatacagtgtttcaacctgctcgatatgagtggcgttgatagtgatagataccgagtggtagttgcctttgctgcttggttttaccgttggggtgtagtcacctggcgcatggcgctgtaccacttcaaccacctgatcaaccagctcaggtaacgcctgccccataactttgtaagtaaaaggagtagggaattcaagcagttcgttaagtttggttttcatgtcagctccggcgtaacgtaattaaatagcaactcccgccagaaggcgggagttttttactgatgcttagtatatggggacggaaattacactttcaagtgttcaatttttaaccaaaccagtgatggaacattaatttaatgtaatcaatgattttgccgaagaagttaccttccgggatttcttgcaacacaaccagcgggcgttgttcgatcgttttgccatcaagctggaagttgatagttccgacgacctgattcttttgcagcggcgcatgcaattcactgctgttcagcacatagctggctttcagatctttcatgcgaccacgcggaatggtcaggtacacgtctttatcaacccctaacgaagcgcgatcagaatcaccaaaccaaaccggttcagaggcgaactctttacctactttcagtgggttaacggtttcgaagaaacggaagccccaggttagcagttttttactttcggcttcacggcctttaaaagtacgtccgcccatcaccgcagaaatcaagcgcatctggccttcagtcgcagaagcaacaaggttgtaacctgctttgtcagtgtgtccggttttgatgccgtcgacattcaggctgttatcccataacaggccgttacggttcagctggcgaataccgttaaacgtaaattctttttctttatagatcgagtattcattcggtacgtcacggatcaacgcctggccgatcagcgccatatcgcgcgcggagctgtactgaccatcagcatccagaccatgtaccgtctggaagtgggtatttttcaggcccagggcgttaacgtagctgttcatcaagccaacaaaagcgtcctggctaccagcggcaaaatcggccatggcgacacaagcatcgttacccgattgcaggtttataccgcggatcagctgagaaaccggaacctgcatgcccggtttgaggaacatcagcgaagaacctttaaacaccgggttaccggtggcccatgcgtcgttgccaatagtgactaaatcagtttctttaaatttaccggctttcattgcctggccgataacgtaactggtcatcattttggtcaggctggcaggatcgcggcggacatctgcgttctgttcggcgagcactttgccggagttatagtcaatcaggatgtaggactccgcatcgatctgcggtacacccgggatcatagttttgatattcaggtcatcggcatgtgcagcagagataaaggctgtgcaaagagccgtggtgagcgccaggcgcttcatgatacgagcggaaaaaatggtattcatggtctgaactacgacatccgtgatggaattaaaaaaagtgccctactatagcaaatgcactaccggcaggcatctgactttccgcgtgactttgttaacgtcatttacagaaattgacacatcagatgcctgctttacgctactgcgcggtggtaataaatgactgtaattgggcttcggtttgcaaacgttgctgcaaggtactggcttcggctttgttggcgaatgggccaagctggatccgccagaccgcgccattttgagttacgcgaccggggacgccgaacttctgtcccagtagctgttggtactgttgcgcacgagcctgatcgcttacggccccgacctgcaccataaagttgccgctggcgctttgcgaggcggcttgcggtgtcaccattgcaggcgaggttgcaggcgttgtcgacggagctgtaacaacgggctgtggagcaggcgtcggttcgctgccttccagtacacctggcgctaaggtcgttggtgcgccgaggaaaccgctgctggttaccggcgcgccggtcggatcttcgctttttagcgtcgaattactgaccggaagaatgtcaccctgcgggccagacactgaacttgttcccgcgccaccgcttaaatcgggaggtgcnggcagggcgtaagtctgtttggcgactgtggtacaagccataccaggaccagaaagcgaaccatcctgggcgacaataatcggatcgatacgaactttggtgttgtttgacgtgttaagacggtcagctgctgcgcgagaaagcgaaataacgcggtcgttgccgtaaggaccgcgatcattaatgcgcaccacgatcattcgcccgttagccaggttagtgattctggcgtagctggggatcggaagcgttggatgggccgccgtcagctgtgtcggatcgaaagcttcgccagaggccgtcaggttactgcctggttcggcatcatagattgccgccagtcccgcctggataaatcgagacggatcctgcacgattttgtagcttttaccgtcgcgctggtaatcctgatttgccgtcgcgttcagtggttcgaaacgcgggtccgccccgctaatttcaactatggggccgttacataccgcaggctgcggtacacttactgtctgttgctgaccatcatcgcttgtacatgccgcgagcattcctgccgcgatgcagatcccgagccactgcttacgcattgcgcacctcttacacgcttttcgacaacattttcctgtgggtgtggattgacattacaatcccgaacccagccatcagcacaattagcgccgatcctccataactgaccagtgggagcggaacccctacaaccggcagaataccgcttaccataccaatatttacgaagacataaacgaataatatcagcattaagccgccagccatgacgcgaccaaaggtggtttgcgctctggcggctatccacagcccgcgcatgatcagcagaatgtagagagcgagcagaatcaaaatgcccactaatcccagctcttccgccagtaccgcgaagataaagtcagtatggcgttcggggagaaattcaagctgtgactgagtgccgtgcagccagcctttgccgcgtaatccgccggagccaatagcaattttagactgaataatgtgatagcccgcgccgagtgggtctgattccgggtccaggagcatcattacgcgctggcgctggtaatcatgcatcaggaagaaccacagaatcggaatgaacgccgctaccagcactactgcgacgccaatcagacgccagctaaggccagagaggaacagtacaaacagaccggaaagcgcaacgaggattgatgttcccaggtcaggctgtgcagccaccagcagcgtgggcataaatatcagcaccagcgcgatgccagtgttcttcaacgatggcgggcaaacgtcgcggttgataaagcgcgcaaccatcagtggtacggctattttggcaatttccgacggctgaaaacgaacaataccgaggtccagccagcgttgagcgcctttagagatggcaccgaaagcatctaccgccaccagcaaaataatacagatgatatagagatagggggcccagccttcataaacgcgtggaggaatttgcgccatcaccaccatgatgaccagacccatcgcgatttggccgattttacgctccatcatgccaatatcctgaccgctggcgctccagataaccagggcgctgtaaaccagcaatgccagtaaaatcagcagcattgtgggatcgagatggactttatcccagaatgtttttttattcggattatccgtcatgattaatggtcctccgctgcggcaaccgcaggattttccgcaggcagatcggtgttgttatcacccagcataatgtggtcgaggatctggcgcatcagcgtaccaaccgccggacccgcgccaccgttctccagaatcatggcgacagccacttgcggattgttgtatggcgcaaaggcggtcatcagtttgtggtcacgtaaacgctcggcaattttgtgcgcattataggtttcgttcgctttcagaccgaagacctgagcggtaccagatttcgccgcaattttgtacggtgcgctggcaaagtatttatgcgccgtaccgttagggcggttagcaacaccgtacataccgtctttcgccagctcccagtaaccggaatgaatatcgccaacgggcggttcatgcggttgtacccatggcacctgtttgccgtcttcggcggtgctcatcagcaaatgcggaaccttcacgataccgtcattaatcaggatcatcagtgccttactcatctggattggggtcgctgtccagtaaccctgaccgataccaaccggaatggtgtcaccctgataccacggttttttaaagcgtttctgtttccattcgcgggtaggcatattgccggaacgttcttccgccaggtcgataccggtataatgaccataaccgaatttacccatccattcggagaggcgatcgatccccatatcgtaggccacctgatagaagaaggtatccgcagattcttccagcgatcttgtgacattcagacgcccgtggccccattttttccagtcacgataacgtttttccgaacctggcagttgccaccagccagggtcaaacagcgtcgtattgcgcgtgatcaccccggcgctcaatgccgaaaccgccacatagggtttaactgtagacgcgggaggataaaccccctgtgtggcgcggttcaccagcggtgtattcgggtcgttcaacaaggcggaataatctttgctggagataccgtcaacaaacaagtttgggtcataactaggcgtggaaaccagcgccagcaccccacctgtacgcggatcggtgactaccacagctgcgcggctacccgccagcagcgtttcaatatattgctggagtttgagatccagcgtcaggtaaatatcgtgtccggcttgcggtgggacttcttttaactggcggataacacgcccacggttgttaacttcaacntcttcataaccggtctgaccgtgcagcacgtcttcatagtaacgctcaatgcccagcttaccgatatcatgcgttgccgcatagttggccagtttgccgtcattattcaggcgttcgacgtctttatcgttgattttcgacacatagccgatgacgtgggtcaacgccgaaccgtaaggatagtaacgacgtttatagcctttaacttcaacacccggaaaacggtactgattgacggcaaagcgagctacttgtacttcggtcaggttagttttcaccggaatggaggtgaaacggtgtgaacgtgcgcgctcttttcggaatgcagcaatatcgtcatcggtcagatcaaccacgctgcgcanagcgtccagcgtttgctgcacgttatcgactttctccggcatcatttctatctggtagatagtgcggttgagggccagagggataccgttacggtcgtagataatgccgcggctgggcgcgataggcaccagcttaatgcggttttcattagagcgggtctggtagtcggtaaagcgaacaatttgcagattatacaggttggcgataagcacgccggtcagcagcaaaatccccaaaaaggcgaccagcgcccggcgcacaaacagcgcggactctgccgtatagtcgcgaaaagagttctgtagtttcatccgctgcgttttctactcaaagctcccttatcactcacggtgataaggatggttggtggtgatgctccacgcccggtacagactctctgcgaccagcacgcgaaccagcggatgggggagggtaagcgccgacagcgaccagctntgctccgccgccgctttacaggcaggcgacaacccttcaggcccgccaatcagtagactgacgtcgcgaccatccagcttccagcgttccagctcagcggctaactgcggcgtatcccagggcttgcctggaatatcgagggtgacaatgcggtttttgcctgcggccgccaacatctgctcaccctctttgtcgagtatgcgcttgatgtccgcattcttgccgcgttnnnnngccggaatttcaatcagctcgaagggcatatctttcggaaaacgacgcaggtactcggtaaaaccggtttgtacccagtccggcattttcgttcccacggcgacaagttgcagcttcacgcattaactccagagtttttccagttcatacaggcgacggctctcttcctgcatgacatggacaatcacatcgcccaaatccacgacaatccagtcggcgctgttttcaccttctactccgagcggtaacaggcccgctgcgcgagactcctgcacaacgtggtcagcaatggacataacatgacggctggacgtacccgtacagatgatcatgcagtcagtgatgctggatttgccctgaacgtctaaggcgatgatgtcctgacctttgaggtcatcaattttgtcgataacaaaatcctggagtgctttaccctgcaagttttccccctgggtgaatcaaatagataaaaatggtctgtcagtatacctgaaccagaggcgatttcgggacaattgtcgccgaatcggctttcgaaagtgggctatcatcccaccccgcgccgcagattgcatcgccatttttgtaaaacaatttctacaaagtcgtgtctggcggaaaaagtctggctgcggagaatatcagcctgcccggggctgtcaatggtcgttgcggcttacccgtaaaaaaacagaaaagtcatgcattctcgaccccgatggcacggctattgaggacgcgtagcgtcgcgaatttttggtttatatcaatggcgctccaacacccctggtcaacgcgaaaatgccacatagantcggcaggcatgccaattaaacgagcaattaacagactaagtacgccctgatggctgacgattaaaatattctgatagtgctgatattcactaagccttgcgataaagcgttccacacgttgcgaaaatgcctgaaatccttcaccgttcgtggggatagcatgctgccagtcattgcaccacgcgctatagttttcggcatcttcttgcatgaggtcgcgatgatgtcgcatctcccagtcgccaaaaaacatttcgttgagttcagggatgatatgaacggggagctggcggtcactgagaaccagtcgcgcggtatgctgtgcccgttccagttcactgcataaaaccaggtcaaaggaaacatcatctagcagtgtatgcagattttgcgcttgctcaataccgcgtgcggtcaggggtgtgggcgcatgaccgctgtacagaccatcgacattcgcttgtgtttcgccatgacnaattaaccacagtcgcatcatgccctccgtaacgacaggtatcagcgatacaagccttgttggttaatgtaagtcagtaccggttccggcaataaatcatcacatgattcaccgttttgcaaacgttcgcggatgatggtcgccgagatgttaaaccacggcgtttcagccagataaattttaccggcaggctgaaggtgaagatcttccgggttatgtgtcaaatgatcttccagccattgctggtattgcggttgcgccatttcaagtgggtaacctggacgccgacagacgatcaaatgtgcattgtcgagtatcgtttcgtattcgtaccaggtcggaaaggtcagcaatgaatcctgaccaataataaacgccagcggcacgtccggcccttgttcctgccgccactctttcagtgtttgcgcagtgtaagagggggcattgcgctttagctcgcgttcatcaagagtaaataatggcttgtcggcaatcgccagttcaagcatgtgtttacgctgtacgctgttcgcttccggctggggacgatgcggaggaacattattagggatgattgtgactcgcgtcagaccaatcaaattcgccagcgtttccacgggttttagatgaccatagtgcaccggatcaaaggtgccgccaaacagagcctgtaaagatttcatatcaaccgtcgataaatacgtccgccaggggtttatggcacaacagaagagataacccttccaactctgcccacactgactgaccgtaatcttgtttgagggtgagttccgttcgtgtcaggagttgcacggcctgacgtaactgcggctgacttaagcgatttaacgcctcgcccatcatgccccggcggttctgccatacccgatgcttatcaaacaacgcacgcagtggcgtatgggcagactggcgtttcaggttaaccagtaacaagagttcacgttgtaatgtgcgcaacaaaataaccggttcgctgccttccagacgcagttgctgaagaatatgcaatgcgcgcttactttttcccatcaacaaagcatcaacccaatgaaaaggagtgaaatgcgcggcatcattcaccgcctgttcaacgcgcggtaatgtcagtttgccgtctggccagagcagcgataaacgctccagtgcctgagccagcgccagcaggttaccttcataacagtagcagagcacctgattcgccgcgtcatccagttctaagttgagctgttttgcgcgcgcagcaacccagcggggaagctgagcctgctccggtgtctgacaggtcacctgcacgctgcgattcgcaagagcagtaaaccaggcggcattttcttgcgctttgcttaatttattaccgcggacgatcaacagcaggtcgtcatgcagaagtccggtgagtgtgagaagttgttcattgatcgccgcgttcggtccgttttctggtaacaacagcaatagcgtttgtcgactggcaaacagactcatggcctggcataacgaaaagatcgcattccagtcagtgttgggatcaatggaaaaagtgtggtgttcttcgaatccttgtgccgcagctacctgacgaacagcgtcctggctttcctgcaataacagaggatcgttaccaagtaaaagatacgccgcgcgcagcccttcattgagctgcgcgcggagttgttccgggtacaaccgaatcatcagttacccagcgtggtggagacgcgtgcaggcgttgccggagtatccgttgtagtcgacgtctgttcttcgtcggaacgaatatccgcagcacggatgcttggcagcttacgaatcagctgttcggcagcacggtcgtacatctctttaatgatcatttcctgctcgttatctttcgctaacgccatttgcgggttatcgaagaatgaacggaagactttggtgctaatcgggtagatatctcgtccaggaatcaataccgacgcgctaacagtcatcaccatctgatattccgcagtttgaccattacggaaaaccgacgcggtatcctgtgagattgatacagcacccaaacgcagggatggaacgtccttacgcgtggtttctttatcaagcaactcgacaccattcagacgtaactggttacgcaccgcacggcttaatggcccgttcggatcgcctgagtccaggatcatgaccttcatagtggaaggaacctgcgtggtgtcacgcagatgccagccacacccggcggtgattaacaccgccagagataacaacaatgttgccagatatcgcacgcttcctcccgcgcttagccaacgaccagattgaggagtttacctggtacgtaaatcactttacgtacagtaacgccatcaagatattttgctaccagatgttcctggccagcacgttcgcgaacctgttcttccgttgcgtccaccggaacggtgattttagcacggactttaccgttaacctgcaccacgaccagcgtggagtcttccaccatcgctttttcgtcagcaaccggccacggcgcgttgtcgatatcgccttcgcctttcagttcctgccacagcgtgaagcagatgtgcggggtgaacgggttaagcatacggacaacggccagcagtgcttcctgcatcagagcgcgatcctgctcgccatcggtcggtgctttcgccagtttgttcatcagctccataatcgccgcaattgcggtgttgaaggtctgacgacggccgatatcatcggtcactttagcgatagttttatgcacatcgcgacgcagcgctttctgatcttcagtcagtgcatcaacgttcagtgccgcaacatcacctttcgcagtatgctcgtacaccagtttccagacacgtttcaggaagcggttagccccttccacgccggattcctgccattcgagagtcatatcagccggagaagcaaacatcataaacagacgaacggtgtccgcgccgtaacgttcaaccatcacctgcgggtcgataccgttgttcttcgacttggacattttgctcatgccggtataaaccagttcatggcctgccgcatctttcgctttcacgatacggcctttctcgtcacgttcaacgatagcatcaaccggggaaacccagttacgttcgccgttttcgccaacatagtagaaggcatctgccagcaccataccctgacacagcaactgtttcgctggttcgtcagagttcaccatgcctgcatcacgcatcagtttgtggaagaagcggaagtagagcaggtgcataatggcgtgttcgataccaccaatgtagatatccaccggcagccagtagttagccgcttcggaatccagcataccttctttgtactctgggcaagtgtagcgcgcatagtaccaggaggactccataaaggtgtcgaaagtgtcggtttcacgcagcgctggcataccgttaacggtagttttcgcccactgtggatctgctttaatcgggctggtaatgccgtccatcaccacatcttccggcaggatcaccggcagctggtcgtccggggtcggcattacggtaccgtcttccagcgttaccatcggaatcggcgcnccccagtaacgctgacgagaaacaccccagtcacgcaggcggtagttcactttacgctcgccaacgcccatcgcagtcagtttatcggcgatggcgttgaaggccgcttcatggtcaagaccgttgaactcgccagagttgaacagcacgcctttttcagtcagggcttgctgagaaagatctggctcagagccgtcagccgccaggataaccggtttgatgttcaggccgtatttagaggcaaactcgtagtcgcgttggtcgtgccccggaaccgccattactgcgcccgtgccgtactccatcaatacgaagtttgctgcccaaacgggaatttcttcgcccgttaatgggtgaacagctttaaagccagtattgacgccttttttctccatcgtcgccatttcagcttcagcaactttggtgttacggcattcgtcaataaaggccgccagttcaggattattttccgccgctttctgcgccagcggatgacccgcagctaccgccaggtaggtacaacccataaaggtgtccgggcgggtagtgtaaacggtcagcgtgttgtcatagtcgttaacgttgaaggtgatttccacgccttcggaacgaccgatccagttacgctgcatggttttaacggtgtctggccagtgatccagtttatccaaatcgttgagcagctcgtcagcgtaagcagtgattttgataaaccactgcgggatctctttacgttcaactttggtatcgcagcgccagcagcagccgtcgataacttgttcgttcgccagtacggtctggtcgttcgggcaccagttgaccgcagaagtcttcttatataccaggccttttttatacagctcggtgaagaatttctgttcccaacggtagtattccggcgtacaggttgccagctcgcggctccagtcataaccaaagcccagcattttgagctggtttttcatatacgcgatgttgtcgtacgtccacggtgccggagcggtgttgtttttcaccgccgcgccttccgcaggcagaccaaacgcgtcccagccgatcgnntgcagaacgtttttgcccagcatgcgctggtaacgggcgatcacgtcaccgatggtgtagttacgtacgtggcccatgtgtagtcgaccagaaggatagggaagcatagacaggcagtaatacttctctttgctctcgtcttcggttacttcaaatgtgcgcttctcatcccaatgaagctgtactttggattctatctcttccgggcggtattgctcttgcatggcagccagtggtcctgttttcattacggctacaaaagtagcgttagaggtggtttttcagatccgcatagcatagcccaaacgtccgcgtcaaaacagcctttcgcgcactcgacgttgaaatgatgcccggattattcatacattaatttacagagtttgtgggcgtattagcaaagcaaggaacaaagaacgtctattattatagtcagttaacgacccgggagatgaaacgatgaacaaggttgctcaatattaccgtgaactggttgcgtcactgagcgaacgcctgcgcaatggcgaacgtgatatcgacgcactggtggaacaggcgcgcgagcgcgtaataaaaacaggggagttaacgcggaccgaggtcgatgagctgacgcgagctgtcagacgtgacctggaagagttcgccatgagctatgaagagagcctgaaagaagaatctgacagcgtctttatgcgggtgattaaagaaagcttgtggcaggagctggcagacatcaccgataaaacgcagcttgaatggcgcgaagttttccaggacctcaatcatcatggggtttatcacagcggagaagtggtcgggctgggaaatctggtctgcgagaaatgtcacttccatctcccgatctacacaccggaagtgctgacgctatgcccgaaatgtggtcatgaccagttccagagacgcccgtttgagccgtaatagtctgatttcgcacagcaataaagagaatatgggccgaatgaaattccccggcccttgtttttatctctacagtaaatcttcagtctcacgaatttcctgactgacatctctggttccggatgactgaactttacgatacaggtcgagagcctgtcggagatcgacaggtcttccttctccgtagtgatacataatggccaggttataccaggcagtggcgtcattgcattcagcggctttcgtaaaccattcaaaggcagcctgataatctttctcaacgccttgtccgtgtttatacatataaccgatgttgacgtaagcgccgacgctcccctgagcggcagccttcagataccagtacatcgcttgcttatagtcctggtccaccccttcgccagcgttataatcccatgcaatttgaaactgagcatgccgattaccctgctgtgcgcttttcaaataccagaatgcggcgagtgtctcgttttgagcaacgccttttccgtcttcataaagatcggccagattgttttgcgcgtcactatggccttgtaatgcagcttgtttgtaccagaaaaatgccagcgtatagtcttgtgcggctccgttgccatttctgtacatccacccaagattattttgcgcataagacattccgctctccgcggctatctgataccaggcaaccgcttctttatagttggggtcttctccacgatccagtatccagccaagggcgttggaagcgaaagtatggccttgtagggcagcttttttcagccagaanatggcttgctcattatctttatgncggcttttatcctcggtatacttttgccctaaggaatactgtgcttcacaatgaccttgctcagcggccagcttcagccagtaaaaggccttttcgtcgtccggagagtcaattgcgctatcgcgattataataaaacccaacaatatattgagcctcgcaatcgcctttttcagcacgttcgataatctcatctattgataaattatcgcagcaacttgacgtgaaaatcattatcatttccttatgattgtagataaaatatattgaatttttatgtgtttcattttttgcgcaagccttattttatgcgtattatgtcgcgtcagaaaagtataaataaacgagcgtcgcaatgcggctaatattcattcaatgaatatttaaggataaatcatatggacatggagtcgcaaaaaatattgtttgcactttccactccgatggaaatacgcaatgaatgctgtttaccttcgcattcatcacccaaaatgtatttaggtacacgcttttttgacctttcttcctcctggggaattgatgaccgtgatgacctgctgcgcacaattcaccgaatgatcgataacggtcatgccgcgcggttggcagggttttatcaccgctggtttcgttattctccatgtgaatggcgtgactatcttgctgaattaaatgagcaaggtcaggcttatgcgcaatttgtcgccagcacagccgaatgctgtggtgagggaggaattaaagcatgggattatgtccggatgggttttttaagtcgaatgggcgtacttaataactggttgagtgaagaagaaagtctatggatccagtcgcgtattcatctacgggctctacgttattatagtaactggcggcaatactttgccggttatacctttggtcggcaatattggcagtctcccgaagatgataatctgcctttattacgtgaattcttagcgcgtaaagaatacgacgattccggcaatgatatgttttatcaattatttgccagtgacgatgcatattacgcgaccttaccctggcaaccactggctgactaccccacatgcccggaaacgcttaaggatatgagcgacctatgaaaaattgctggaagatcctcaacatagaggaaacgactgatgtcgatattatccgccgcgcttatctggcgctgttaccgtcctttcatccagaaaccgatccgcagggttttaaacaacttcgtcaggcgtatgaggaagcgctccggattgcgcagtcgcctgctaaatctgtttggcaaccagaagaatatgaggtagcagaacatgaaattctgctcgcctttcgtgcgttacttgcctctgatagtgaacgttttctgccctccgcctggcagcgattcattcagcaattaaattattgctcgatgaatgagattgatgaattacgctggtcgctgtgcacaatagccatgaacactgcccatttatccttcgagtgcgtggtgttattagcagaaagattgcggtggttgcaggaggaaaacgtcggggaaatagacgaagaagaactggaatcctttttatatgccattgcgaagggaaatgtttttaacttccagatcattctgcatctgcccgttgccgtgcaaaatgacaccatcgatttttaccaaatgttcgcccggatttggtcatcgcatccagaatggctgacattgtatttagcgcaacatcgcgcagtgattatccccgatgatgcaaaactgcacagaaatttactccgctggtatagtgcaggtcgcctgggaatccccgaactcctggattacgcccggtcgtggcgggaagctgaacctgataatgaagatgcgcgttattatgaatacgcgcaacgcgtctattgtggagaaggcgaaagcctgctggcagaactttgtgactactggcacgagtatccctccactcaggcggatgctttaatgttgcaatggtgccgtcagcatcgagtcgattattacccattagtggtgatgatgattgaagctcgtgaactggttaacgaccagggaaaaccgntactttatgtccccggcgacagcgcccgtacgcgttttcatttatacgaaatactcagcgatgaaaaactctctgctctggggcgttcactggtcgagatggttttgcacaaaggatgtaagccgcggatctcactcacgcgtgatacagaacataccttatggccattatatctagttgccaaacaattagtgcaggccagccaacctacagaagaatcattaatgccgatcgtaagccgtcttgatgcagaaaatcgttgtccactggaagcattaattattcgtcgattattaattcaggcggcgaattttaccgagaagcaaactgttgaaccggagccgcaaccgcagccaatgcccgttgacgatggtgggccaggctgtctgggcatcattaaaattattttctatatttttatctttgctggtttgatagggaaaatactccatctgttcgggtgacagtcgacgttaatgtgcgggaagcccggcaagtaatctttccgcatttttgtaatgttgtttggcggccagttttaaccatttttgagattcataatggttaacattaatacctgagccatttctgtagatcaaacctaaagtatattgagcatgagcatacccttgttcagctgcttccttataccagagaattgctttacgggtgtcgggtttgacccccagacctttgaggtagatccaccccagtttactttgcgcgcgtggattttcctgttccgctgattgctcataccagtatctcgcctgtgtataatccagtggtttaccgtcgctaccatgaagataaaattctccaaggcgatattgcgacgttgagtgaccatgaatcgcggaaagctccgtggctgccgtggtgaatggaagactgcccggtgagcttaaataatcaaaggcataattcaccatggctttatcacgcaacgtcgttttcttgggttggctaatacaggtaattgctgcaactataaaaattncgaatatatacattaattttttattcatgtgtgaatgcttcgattttctttttattttganagcgtcaagtttatactcatcaataataaaaaagtagtcagttaatgcacttaagggattattaacaaatgaataaggaagaacaatatcttctttttgcgcttcctgcncccatggaaatacttaatcagggttgcaaacccgcgcatgactcgccaaaaatgtataccgggataaaagaattcgatctctcatcatcctggggaataaataatcgtgatgatttaattcagactatttatcagatgactgatgatggtcatgccaatgatttagctggcttatatctgacatggcatcgctcttcccctgaagagtggaaagcattaattgctggtggctcggagagagggttgatttatacccaattcgttgcccaaaccgctatgtgttgtggggaagggggaatcaaagcttgggattatgttcgaatggggtttctgtcacgggtcggtgtgctcaacaagtggctgacggaagacgagagtttatggctgcaatcgcgcgtctatgaacgagctcaccattactatcacagctggatgcactatttttccgcctattcactagggcgtctctactggcaatcttctcaatgcgaagacaacgcttcgctacgcgaggcgctaaccctgtacaaatacgatagcgccgggagtcggatgttcgaagagctggctgcgggaagcgatcgtttctatgccacgcttccctggcagccattaactgtccagcctgaatgcccggtaacgcttaaggatgtgagcgacctatgaaaacatgttggcaaatcctcgaaattgaaagcacgacgcaaatagacattatccgccaggcttatcttgctcgcttaccgttatgtcatcccgaaaccgatccgcaagggtttaaagcattacgccaggcctatgaagaggccctgcgactggcggtaaatcctgtcgaggaagcagatgatgaagaaaaagatgatgccactgagcatgaaatactacgtgtattcagggcattactggattcagaaagtgatcgttttcagccctccgcctggcagaaatttattcagcaattaaatacctggaacatggaggatgtcgatcaattacgctggccgctgtgtgcaatcgctatagaagcgcgatatctttcattaaattgtgcttctttgctggcagagcgtttgaactggcattcgtttaatgacagcgaaggaatagatgagtaagaaagggaggcttttcttgaggccattcaggctggtgattgtttcgatttccttggccttctggtatatcccgttgcgttgcagaaccagactgttgagtattacttcgctctggaacgttgctgccgttaccatcctgactatgtcactgcgtttttggcgatggaaggtccgtggttcattcctgatgatgcaaagttacatcgcaaactgttgcgctggtacagctcggtgcaaacaggtatggcggaactcattcctgtagccgaacagtggcaaatggaagaaccagaaagcgaagatgcccggtattaccagtgtgcacaacgtttgtactgcggcgagggggaaagcctgcttaccgatctctgcgcgtactggggaagttacccatctacacaagccgataatttgttgttgcagtggagcgcacaacattgcccggattatttcgcgttattagtgatggttatcgaagcgcggagcatggtagatgcgcaaggtaaaccgttgaaatatgttcctggtgagagcgcccggacgcgtctgttatgggcggaaattttacatagcggaaaactatcgccgttaggtcaatcgtttattgagtcgctattcttcaaacgcaaagcatgggcgtggtggaaatcgagagtcggtagcgagacagaagaagattcaccgttactggatttgtatcgggtagcggaacaggtagtacttgaagcgtttccgaaacaagagatgctggcccgtcttaatacaaggctggaaggcggagatgctcatccattagaggccattatcacccggatgctgttgacgaaagtaaaactcgagccggaggatgaagatgtcgatgagccaacacctgaaaaccatgaagaaaaaaatgatgaggatgaaaaaccacagagcattaccagcattatcaaaatcagcttaacggtgctggtgataggttatgctctcggcaaaatcgcgatgttgtttagttgacgatgtgttttttgcgccgatgccggatgcagcatttacgccgcatccggcagccgtgattatgggatctcaatggctaaataaacgctcgcctgccgcctgacctcatcgacgcgggccatatcgtttgactgcagcgccgcatcaaaatcggtgatcacccggccaatctcttctcgctcgtcacccagcgcccgcgcccacaactcttccagtttggccttaaaggtgcggttgatgagcatatcgcgcggataaattttcaatgcggataaccgcgtccgactctcttcaatctgctgcgcgctcaatgttaccgggctgtggttaatcactctggacttaacgctgccgtcttccagaagcacgtcaacttcaagcaaaccgttgatatcataactaaagcgaatatcaatcgactgataagccccggttctcttcaacggcacatcgaaggattccaccagaatgttgtttttaactttgtggttttctccctgatagacgttaaccgtaatagaatcctgttccgggtgcatggttgaataagtttctacacgcgacacgggcacagtggtgtttcgttcaataatcggcgagaaaatgccggaaacgccctggcggttaacctcaacgcccaacgagtaagggcaaatatcagtgaggatcacttcttcaatatcttcactgcgtaagcggcaggctgcctggattgctgcgcccagcgcgacaatggtgctcggatcgtaactttgatacggtaatttgccaaacagacgcacggcgattcgctgcaccagcggcatttgtgacgcgccgccaaccagcaccagactgtcgatttgactcggcttcagacgcgcatcgcgcaacgcctgttcaatcggcactcgcaagcgattgagcagcggcaaccacaaatcttccagttcgttctcgtaaaattcgcattcccgcgtttcatcctggtactgccagcgaatgtgcattggcgattgattgctacattttgccgcttccacacaggcatacaaggctgccagttcactctcgttaagcgtggtcctggcgacatccgcgcgttttaaaacctcatcgaccagcatatgggtnaaatcttcgccaccgaggaagttgtcgccagcggaggcgtgaacttcaatcaccggcgtggcgtactcaagcaccgtgacgtcaaacgtgccgccaccgagatcaaacaccagcgaacgggtattttgttgggtatgcaggccatacgccatcgcagctgctgtgggttcattaattaagcgtaccgcatttaaaccggctaactccgctgctaaacgggtatgcttgcgttgttcatcgctgaaataagccggaacagagatcaccacatctttaatcggacgttgcagaaattcttcggcatcttcttttaatgagcgtaataccaaagaggacagttctggcgcgttaaatgtgtcgctgcctaaccgccagttggtattactgcccattgcacgtttaaataacgctgccgttttatccggatgcgaagtacgccgtgatacagccggttttccgactaaaatatgattattttcatccatgctaattatggatggtgttaaatattcaccgaacttatttggaattaattgcgcggcaccgtctttccagacggcaattaaactattggtagtaccgagatcgataccaatggcgagttctgcattatccattgcatttatatcttgaaagaaaaagagataaacagattaagaccacccaggtaacgcgtggtgatcttaatcaatgacgtgtgttaagcgtaaaatttcagacgatcagccagtaaatcaacaaagccctgacgatcaacatcgaccattacagtggcattcggtttattgccagtcagataataataatcaacaaccgtcataccctgggtatatttcccctgtgtttccacgccaacccagcgctcaacagtggtaaacaactccggttttaacagccaggcgatggtgcatgggtcatgtagcggtgcgccgacaaagccccatttttcgtctttatgatattcgaggaagaaatccagcagttcggcaacaatggttgaaacagggttgccaatcgcgcggaaacgctcagtgtcttcaacgtggatttgtgctttgtgagtaacatccagaccggccatcaccaccgggatccctgactggaagacaatttctgccgcttccgggtcaacgtaaatattaaattcagccgcaggcgtccagttacccagtcccatagcgccacccataatcacgatacgggcaattttgctatgcagttccggatggctattgagcagcaaggcaacgttagtttgcggtccggtagacacaatcgtgacaggttccgcactttcacgcagcgttttcgccatcagctctaccgccgtacagttttgcggtgcgaacgtcggttccggtaatgccgggccgtcgagaccgctttcgccgtgcacattgtccgcgataatcaactcacgcattaacggttttaccgcgccgcctgccaccggaatatcggtgcgattaagcaaggtcagcatacgcagaacattgcgtaaggttttttctggtgtctggtttccggcggaagacgtaattgctttgacatcaagctctggtgaggcgagggcgagaactattgcgatagcgtcatcatgacctgggtcgcaatctaacagaattggcagtgccattgttgctccttgttgtgtgcttctttgcgacaagggtaacgccaggatgtaacagatacgaggggcgagacgataaagcgtgagatggcgcgcacttgggtatgcgcgccagagtgattaatgcaggattttcgcgaggaagtcttttgcgcggtccgatttcggatcatcgaagaacgcatctttcggcgagtcttcaacaattttaccctcatccataaagatcacccgattcgccactttacgggcaaagcccatttcgtgggtcaccaccatcatggtcatcccctcgttcgccagttccaccatcacgtccagtacttcgttgatcatctccgggtctagtgccgatgtgggttcgtcgaacagcatcgcaataggatccatacacaatgcgcgagcaattgccacacgctgctgctggccgccggaaagctgcgccggaaatttattggcatgtgcggaaagtcccacgcgntccagcaatttcaatgctttttcacgagccggtgctttatcgcgtttaagcactttcacctgcgccagggtcaggttttcgataatcgacagatgagggaacagctcgaaatgttggaataccatcccgacgcgagaacgcagctttgccagatcggttttcttgtcgttaaccacgataccatcgacggtgatttcaccttgctgcactggttcgaggccgttgacggttttaatcagcgttgatttgccggaaccagacgggccgcaaaccaccaccacttcgccttttttcacttcggttgagcagtcggtcagcacctgaaagtgaccataccattttgaaacatttttcagggtaatcattatgctgtccttcttttcaagtagctgaccaacaacgacgcgctaaggctaataacgaaataaacaaatccggcaaacaggatcatctcaacctgcgtgccatcacgctcaccaatggttgaggcggtacggaagaaatcggccagagataacacatacaccagcgaggtatcctggaacagtacgatgccctgagtgagcagcagcggcaccatcgcgcggaacgcctgcggcagaataatcagtttcatcgactgccagtgagtcattcccaacgccagcgcggcgctcgactgaccacgagaaatactttgaataccggcacggataatctctgaatagtaggccgcttcaaacatcgaaaacgccaccatcgccgaaattaaacggatatcattttttggtgataatcccagcacgttttgcagaaaacccggcacgatcaggtaaaaccacagcaaaaccataactaaaggaatcgagcggaatacgttnacgtaggctttggcaaaccacgctacgggcgcaaagctggacaagcgcatcaccgccagcatggtgccccacaaaataccaatcacgactgccgtgacggtgattttcagcgtgatcaccagcccgtcgagcagatatggcagggaagggacaatggaactccagtcaaactcgtacattatttgccccccatgttgccaggcaggcgaactttacgttcaaccagcgtcatcaccagcatgataaaagcgttaataaacacatacgctagcgtaatggcggtaaacgactcccaggcgtgagccgagtaatcgagcaatttactcgcctgcgctgccatatctaccagaccgatggtcgaggcgatggcggagtttttcaccaggttcatcatctctgaggtcatcggcgggacgataacgcgataagcattaggcagcagtacgtancggtaagcctgcggcagcgtcagacccatagccagcgcggcattcttctgcccacgcggcagcgactgaatcgcggcgcgtacctgttcgcaaacacgggnggcggtaaacagccccaggcagagcatggatgaaaggaaaaactgaatattgggatccagctcggccttaaaccacatgccgattttctccggcagcagctccgggatcaccagataccaggtaaagaattgcacaatcaacggcacgttgcggaacagttcgacatacaacgtacccagaccggagagaaaacggtttggaacggtacgtaaaataccgaaaaatgaaccgacgaggaaagcgataatccaggcgcagatcgacaaagcgatcgtcacctgaaaaccactccagatccaaccaagataggtggtgttgccgaacggggcttgttgtaaaaaaataccccagttccagtctatagacataaatctactccagaaaaaagagggtagcagcgttaactgctaccctcgaagattgttacccagcgtattgcggttttcaggcccgatggggaacgaccatcaggcgtatagtctgtccgtgctacgtaacaatcgagagggctagaatttccgcccctggttcttgtaattagttcagtgctttgtcattcggttctttgaacagtgctttcatttcgtctgacagttcgaaattcatgttcaggtttttcggcggaatgggatttttgaaccatttatcaaaccatttttccgcttcaccggaggtctgcacctgagcgatagtgtcatccatcagctttttgaactgcggatcgtctttacgcaacatgcaaccataggcttcctgagactgcggcttgccgacgatatcccagttgtctggtttcttcgctttcgcacgttcaccggccagcagagcatcatccatcataaaggcaacggcacgaccgctttccagggtacggaaagagtcaccgtgatctttggcgctgatgatgcgcatattcattttttgctcttcattcagtttgttgagcaaaacttcagaggtagtgccggaagtgacgactacggctttgcctttcaggtcggcaaaatctttgatatcgccgccctttttggtcaacaggcgcgtaccgaccacgaaaatagtgtcagagaaagccgcctgtttttggcgttcgacgttgttggtggtagaaccacattcaaaatcaaaagtgccgttttgcagcagcggaatacggttttgtgaggtaatcggaatcagtttcacctgcaagtccggtttgttgagtttctttttcactgcttcaacaatggcgttggagtaatcctgcgaataacccaccactttttgctgattgtcgtaataagagaaaggtactgaagattcacggtgaccgacgacaatcacgccgtttttggcgattttgtccagcgtactgcccgctgccggggcggcgtcatctgcctgtgccagtcctgcggaaagcgccagggccaggattgctgtggcaggtttacgtaattgcatatccaactcctttatcttctgcgttaagaacgcatggatacccgttgtgagtgtttgtgttgttatcatctgcaactttattgtgtagtgttgtgcctgttaggtaacatttagtttggctaaatgtaaagatattgctgttttattgtttatatttgggaggtgcgccgcaccattccgaagcaaaattcttaaaatgcactcttttggtgctaccggtggattgctgtggtgcaaccgggttgtactgatgctggttaaagctttgccttgtataacaaagcaatagatgtgccaaagttggataggagaatattgttatccggataatgcactgatgccgcatccggtgagcgtgccgaaatatgggatgtattccggcacgataagaagggattatttacgtcgctgacgcagactcatcaacacagcagcaaaaccaaacagtgccgtcagcacccacagcggccagttgccggtacgtgcgtatggtgtgagtccggtggtcggcgtcacgttagtggttaacacctcgcgggtgaactgcgggatcatcgcctgaatctcaccctgcgggccaatcaccgccgtaatgccgttgttggtgctgcgcaacagtgggcgcgccagctccagcgcacgcattcgcgccatctggaagtgctgccatggaccaatagacttaccaaaccacgcatcgttggagatagtcagcagatagtcggtatccgggcggaagttatcgcgcacttgctcgccgagaatgatctcgtagcaaatagccgcagtaagctcaataccatttgccgacagcggcggctggatatatggcccacggctgaacgacgacatcggcagatcaaagaacggtgctaacggacgcagaatcgactccagcgggacaaactcgccaaacggcaccagatggtttttgttatagcgatcggctgattcgtagctgtacggtgcacctttacccagtgtgatgatggtgttgtaggtatcgtaacggttctgcttattaagacgcnnnncaacaatcccggtcaccagcgagctacctttatcacgcaactcaccgtccagtgctttgaggaacggttgctgattaatttccagatcggttatcgccgactccggccagataatcaacgatgatttgcccatcagcggtgccgttgcgttgtagtaaatcttcagcgtattaagaagctggccttcgtcccatttcagcgattgcggaatatcgccctgaaccatcgaaacctgaatggttttctccggttgtggggtaaaccactggatgtaacgcagcgggaagggaagggcaaacagcacgacggccaccaccagcggacgccagttgcgtttgactaacgccagtgccagcaggccgctaaccatcataagcaggaagttaatggcttccacgcccattagcggtgccagcccttttaacgggccatcaatctggctatagccgaactgtaaccacgggaagcctgtcagtacccaaccgcgcagaaactcggtcacttgccagagagcaggggcggcaatcgccacgcgcagccaggtggttttcggccacaggcgcgacagcacgccagcaaacagtccggtatacagcgacaaatacgccgccagcagtaccaccaggaagatgttaaccgggtcaggcattccgccaaaggtcgcgatgctgacatagacccagttaataccgctgccaaagaggccaaatccccagcaaaagccaatagcggcagactggagtggacggcggttaaaggtcaacgcctgaagccccatcagcgaaataatcgccgcaggccagacgtcgtaaggagagaaggccagcgttccgcaggcaccgaataataacgccagcagcaggcgaatgcgctggcgttcaattaatgaggcaaaagccatgtagttatctatccagtttcggttttattcatccagcttcggctggggtgagtcatccgggattttgacatgaacctgaataatacgccgactgtcggccatcgccactttgaactggtaaccgtcgatgtcgatggtttcgccacgtgccggaagatgcccaaatgcctgcatcaccagaccaccgatagtgtcgacttcttcatcgctaaagtgggtgccgaacgcttcgttgaagtcttcaatggaagccagtgcgcgcacggtccaggtatgacgactcagctgacggaagtcgatatcatcttcttcgtcatattcgtcttcaatctcaccaacaatcagttccaggatgtcttcaatggttaccagaccggaaaccccaccgaattcgtcaataacgatcgccatgtggtaacgctgagagcgaaactctttcagcatccggtctacgcgcttactttcaggaacgacaaccgcctgacgtaacactttgtccatgctgaaggcttcagcatcgctgcgcataaacggcagcaagtctttcgccatcagaatcccttcaatgtgatctttgtcttcgctaatcaccgggaaacgtgagtgggcggactcgatgatgacatcaaggcattcgtccagcgtctggttgcgtttcagggtaatcatctgggagcgggggatcatgatgtcgcggacgcgttggtctgcgatgtccatcaccccttcgagcatatcgcgcgtatcttcgtcgataaggtcgttctgcccggaatcacggatcagcgccagcagttcgtcacggtttttcggttcaccgtggaaaagttggctgagtaacagggagaaaaatcccttcttgttgcttatcgtgtcactactgtgtgaattgtcgtcgctcatggcgtcgtatgggttctcatgttagttaatcaaaacgccgtcgttaatcaccaacggcggggacgtctgccagtcaaatggctggcaaattattctttctcggcaatgtacggatcctcatagcccagagcaagcataatctctgtttcgagggcttccatttcttctgcttcgtcatcttcgatgtgatcgtaacctaacaaatgcagactgccgtgcaccaccatatgcgcccagtgcgcctccagtggtttgccttgctcctgagcttccttctcaaccacctgacggcagataaccagatcgcccagtagcgacatctccatgccaggcggcacttcaaacgggaaggagagcacgttggtcggcttatccttaccgcgataggtcagattgagactgtggctttcggcggtatcgaccacgcgaatcgtcacttccgactcttcctgaaactgcgggatcaccgcattcagccatgtttgaaactggctctcttccggcaatccggagttatcttcacatgccagttgtaaatcgaggatcacctgactcatttttgttcctgttcttcgcgcttgcgttctgccgccagcgccgctttacgtttttgttcggcttcttcccaggcttcataggcgttaacgatacgcgccaccaccgggtgacgaaccacgtcttcgctgtggaagaagttaaagctgatctcttcgacatcggccagcacttcgatggcatgacgtaagcctgatttagtattacgcggcaggtcgatctgtgtgacgtcgccggtgataaccgcttttgagttaaaaccgatacgggtcaggaacatcttcatctgttcgatggtagtgttctggctctcatcgagaatgataaatgcgtcgttcagcgtacgaccacgcatataggccagcggtgcgacttcaataacgttgcgctcaatcagtttctcgactttctcaaagcccagcatttcaaacagcgcgtcgtacagcgggcgcagatacgggtctactttctggcttaaatcgccaggcaggaagcccagtttctcaccggcttctactgccggacgagtcagcagaatacggcgaatttcctgacgctccagggcatcaactgccgcagccactgccaggtaggttttacccgtacccgccgggccaacgccgaaggtaatgtcatggtcgagaatattggcgatgtactgcgcctggtttggcgtgcgcggcttaattacgccgcgtttggttttgatattgaccgctttgccgtactccggcacgctctccgcgctttgctccagtacccgtgcttctttaatcgcaaggtggatctgttccggttcgatatcctgaatctgaccgcgcatcggggcagtatcgacatacaggctacgcagaatgtctgccgcagcggtgacgcaaatcggacggccggtcagtttaaagtggttatcgcggcgattgatctcgatgccgagacggcgttcgagctgcttgatgttgtcatcaaacgggccgcacaggctcaacagacgcgcgttgtctgctggctccagggtgatttcgcgagtgtctatgttcaaaccgttcctcttatctgtatgccgccggaagctgaacattcaccggcctataaggaaattattcacgccacaggaaaaaggcgcaagcattgcgataaagatggggataaagagagaaaaaacaaggcccaccggaacggcgggcctgagaattacggctgataataacccacgccaaggtcgttttctttgcgagtacgggcaatcaccgattctggtgtttctgccacgcgcagacccatttcatcttcagtacgcaccactttaccgcgcagagagttcgggtagacgtcggtaatttctacatcgacgaatttaccgatcatatccggcgtgccttcgaagttgaccacgcggttattttccgtacgcccggaaagctccatgatgctcttacgcgatgtaccttctaccagaatacgctgggtggtgccgagcatccggcggntccacgccatcgcttgctgattgatacgttcttgcagaatatacagacgctgcttcttctcttcttccggaacatcatcaaccatatcggcggctggtgtacccggacgtgcagagaagataaagctgtagctcatgtcgaaattgacgtcggcaatcagcttcatcgttttctcgaagtcttcggtggtttcgccagggaagccgacgatgaagtcagaactgatctgaatatctggacgcgccgcacgcagtttacggatgatcgctttgtactccagcgccgtatgggtacgtcccatcaggttcagaatgcgatcggaaccgctctgtaccggcagatgcaggaagctcaccagctccggcgtgtcgcgatacacttcgatgatatcgtcggtgaattcgatcggatggctggtggtaaagcgaatacgatcgatcccgtcgatcgcagcaaccagacgcaacagatcggcaaacgatccggtggtgccgtcgtagttttcaccacgccaggcgttcacgttctgaccgagcaggttgacttcacgcacgccctgagccgcaagctgggcaatctcaaacagaatatcgtcagacggacggcttacctcttcaccacgggtgtaaggcaccacgcagtaggtgcaatatttattgcagccttccatgatggagacaaacgcggtcggcccttcggcgcgcggttccggtagacggtcaaacttctcgatttccgggaagctgatatctacaaccgggctgcggtcgccgcgcacggagttgatcatctccggcagacggtgcagcgtttgcggcccaaaaataatatcgacatagtgggcgcgctggcgaatgtgctcgccttcttgcgatgccacgcagccaccgacgccgataatcaggtctggattcttctcttttaacagtttccagcgacccaactgatggaagactttttcctgagccttctcgcggattgagcaggtgttcagcagcagcacatccgcttcttccgccacgtcggtcagttgatagccgtgggtggcatccagcagatcggccatcttcgatgaatcgtactcgttcatctgacagccccaggttttaatatggagttttttggtcatcgacttgctcttgcgaaatagtagccaggaatgcagggcgcatagtgtaatgctttgctgccgttgtgaccagtatgagcgttatcagcccttgggggtaaaaatcctgtaaacttaaagcatattgctaacaggatgattgaccatgacaaatcaaccaacggaaattgccattgtcggcggaggaatggtcggcggcgcactggcgctggggctggcacagcacggatttacggtaacggtgatcgagcacgcagaacctgcaccgtttgtcgctgatagccaaccggacgtgcggatctcggcgatcagcgcggcttcggtatcattgcttaaagggttaggggtctgggatgcagtacaggctatgcgttgccatccttaccgcagactggaaacgtgggagtgggaaacggcgcatgtggtatttgacgcagccgaattaaagttgccgttgcttggctatatggtagaaaacactgtcctgcaacaggcattgtggcaggcgctggaagcgcatccgaaagtaacgttacgtgtgccaacctcgctgattgcattacatcgagataatgatcttcaggagctggagctgaaaggcggtgaagtgattcgcgcgaagctggtgattggtgccgacggcgcaaattcgcaggtgcggcagatggcgggaattggcgttcatgcatggcagtatgcgcagtcgtgcatgttgattagcgtccagtgcgagaacgatcccggcgatagcacctggcagcaatttaccccggatggaccgcgcgcgtttctgccgctgtttgataactgggcatcgctggtgtggtacgactctccggcgcgcattcgccagttgcagaatatgaatatggcgcagttacaggtggaaatcgcgaagcatttcccgtcgcgtctgggttacgttacaccgcttgccgctggtgcgtttccgctgacacgccgccatgcgttgcagtatgtncagccggggcttgcgctggtgggtgatgccgcgcacaccatccatccgctggcggggcagggggtgaatcttggttatcgtgatgtcgatgccctgattgatgttctggtgaatgcccgcagctacggcgaagcgtgggccagttatcctgtcntcaagcgttaccagatgcggcgcatggcggataacttcattatgcagagcggtatggatctgttttatgccggattcagtaataatctgccgccgctgcgttttgtgcgtaatcttggtttgatggcggcggagcgtgctggcgtgttgaaacgtcaggcgctgaaatatgcgttagggttgtagccttacaacattgccggatgcgtgccaaccgtaggtcggataagacgcggcagcgtcgcatccgacattgaaggataagacgtgtcaacatcgcatncgacattgagtgaacgcagaaaagcaaaaagctcgccgaagcnnnnntttntaatgtggctggggtacgaggattcgaannnnnnnatgccggaatcagaatccggtgccttaccgcttggcgataccccaactgggtgcacttacaaggtaagcgtcttgaataaattggctggggtacgaggattcgaacctnngaatgccggaatcagaatccggtgccttaccgcttggcgataccccaacaaattggtttttgaatttgccgaacgtattcgacacattcagaatttggtggctacgacgggattcgaacctgtgaccccatcattatgagtgatgtgctctaaccaactgagctacgtagccagattgtttcttcgatggctggggtacctggattcgaaccagggaatgccggtatcaaaaaccggtgccttaccgcttggcgataccccaataaccgggcggtgaaccgcttactcaaagaagatggctggggtacctggattcgaaccagggaatgccggtatcaaaaaccggtgccttaccgcttggcgataccccatccgtacaacgctttctggtgaatggtgcgggaggcgagacttgaactcgcacaccttgcggcgccagaacctaaatctggtgcgtctaccaatttcgccactcccgcaaaaaaaagatggtggctacgacgggattcgaacctgtgaccccatcattatgagtgatgtgctctaaccaactgagctacgtagccatcttttttttcgcgataccttatcggcgttgcggggcgcattatgcgtatagagccttgcagcgtcaacctctttttcaaggaaaattgctcgaaagtgactgtttggttaggttgcgaacagcgtggcgctatattcgtcaattattgtttactttgtgttttttcccaccctacagccattcttttgtcatacaggatgaaattcggaatttaacaatagtggtgggaaattaatctatgaaatactggcctacagtgatgagttgtcaaacagngatgtggcaaacccggaacatttccttactgcatatcagaatcaacaagcacctcaataactgaaacagccccggatttcaccggggctgtttcgcatttcttacttatacgccgactggtgaacaccaaccgcgcgaccagacggatcgtccattttcttgaacgcttcatcccattcgatcgctttagcggaagaacacgcgacggaaggaccgcccggcacgcactcagcggcgctcggaagcgggaatagttcttcaaagatctcccggtacagatacgcttcttttgaggtcggtgtgttgtacgggaagcggaagcgggcagtttccagctgttgatcagaaacctgctgcgccgccacttctttcagggtgtcgatccaactgtaaccgacgccatcggagaactgctctttctgccgccaggccacgcttgcgggcaggtatgactcaaaacattcacgcaggatgtgtttttccatcttgccgttaccgcacattttatcctgcgggttaatgcgcatcgccacgtcgaggaatttcttgtcgaggaacggaacgcgtgcttccacgccccaggctgacatcgctttgttggcacgcgcgcagtcatacatatgcagggccagcagtttacgcaccgtctcttcatgcagttctttggcattcggtgctttgtggaagtaaagataaccgccgaacacttcatcagaaccttcaccggacagcaccattttaatgcccatcgctttgatcttacgcgacattaaatacatcggtgttgaagcgcgaatagtggtcacatcataggtttcgatgtggtaaatcacgtcgcggatggcgtccagaccttcctgtacagtgaagtgaatttcatgatgcacagtgcccagatggtttgccacttcctgggctgctttcagatccggtgaacccggcagacctacagcaaaggagtgtaactgcggccaccaggcttcagagcgttcctgatcttccacgcgacgggctgcgtatttcttggtgatagcggaaataattgaggaatccagaccaccagaaagcagcacaccgtaaggcacatcagacatcagatggcttttaacggaatcttccagagcctgacgcagctcgtttttgtcggtcacgttatctttcactgcatcaaagtcgaaccagtcgcgatgataataagaacgaatttcgccgtcctgactccacaaatagctccccgccgggaactctttaatcgtgcggcaaactggcaccagggctttcatttctgaggccacatacagctgaccgtgttcgtcatagcccatatacagtgggatgatccccagatggtcgcgaccaatcaggtaggcatctttttcgctgtcgtacagggcaaaggcaaacatgccctgcaagtcgtcgagaaattccggccctttttcctgatacagcgcgaggatcacttcacagtcagaccctgtctggaactgataacgatcgccatattcagcgcgcaatgcctggtgattgtagatttcaccgtttaccgccagtacgtgggttttttgttggttgtagagaggttgcgcccccgcnttaacgtcaacaattgacagacgttcgtgagcgagaatggctttatcgctggcataaataccggaccagtccgggccacgatgacgcatcaggcgtgacagctcgagtgctttcttacgcagctcaactgcgtctgttttgatatcgaatacgccaaaaattgaacacataaccttctccgttaacctggtatttgttgcttgttgtgtttgcttgtttaaaaaaatgccgcaaagcagcactgtgcgcaagcgatttggcggtgaaaaaataaaaaacgtaatggtgattgctgatttgtgaaaaaggggagggtgcggtgatgtatttattgatggatcgataattttnnnngggttttattgaatgggatgattttaatgatgggtaaaaataagaaaccacgtcctgagacgtggttgctattcagataacgtcgatttcagcgactgacgggtaaatccagctggggcggaaaggcatactgtcgatatcgtcgagcgacgaaacaccagaaagcaccagaatcgtctccagacctgcctggaagccggccagaatatcggtacgcaggttatcgccgacaatcaccgtttcttccgaatgtgcctgcattttgtttaatgccgcgcggataatccacggactcggcttaccaacatagaacggtttgcgcccggagattttctcaatccctgcacacaacgcgccacaggccggataaaaaccgcgcccgtgggtgtccgggttggtggcgataaagcgtgcaccgttagcgacgaaataggccgctttatgcatcatgtcccagttgtaggaacgcgtttcgccaacaatcacaaaatcagggttcacatcggtaatagtgaaaccggctttgtacagttcatgaatcagtgcgccttcgcccaccacatacgctttcttgccttcctggcgacgcaggaaatcggcggtcgccatcgcagaggtataaaacacgctgtcaggtacatcgacaccggcagtggcaaagcggttcgccagatcttgcccggtctgcgaaggatagttggtcagcaacaccagcggcaggcctttatccataatcccgtgcaaaaattccgctgcacccggtacggcgacgttatcgtgcatcagcacgccgtcgatatcgcaaattacatttttaatggtcatggactacccagaatattgacaacaataagcgccactataaaagcacattaattttccagcaaatgctggagcaaaataccgttgagcatggcgcgttttaccagcgcaaaagcaccgattgccgagcggtggtctagctcagaacgtaccaccggcagattagtacgaaacgccttcagcgcctgagtattaatgcagctttcaatagcagggagcagcactttatcggcttcggtgatttcaccggcaataacaattttttgcggattaaataagttgatagcaatggcgatggttttgcccagatgacgaccgacatactcaatcacttccgaggccaggctatcgcctttgttcgcggctttgcagatagttttgatggtgcagtcgtccagcggcacgcggctctggtagccctgctttaacagattcaacacccgttgttcaatagcggcgttggcagcgatagtttccaggcagccaaagttgccgcagtggcagcgttcacccagcggttcgacctgaatatggccaatttcaccgacgttgccgttgcggccaataaaaatgcgcccgttagagataatcccggccccggttccgcgatggacacgcaccagaatggagtcttcgcaatcctgacttgcaccgaagtagtgctccgccagcgccagactacggatatcgtgaccaacgaaacaggtcactttaaaacgctcttccagtgcttctaccagcccccagttttctacctgaatatgcggcatgtaatgaattttgccgctgtccgggtcaacaagtcctggcaggataacggaaatggcgatcagctcgcgcagtttgcgctggtagctatcaataaactgagcaatggcattcagcagggcatgttccagcgtctgctgggtacgttccggcagcgggtaatgttcttctgccagcactttgctgctgagatcaaacagggtgatggtggcgtcgtgacgaccaagccgtacgccgattgcgtggaaattgcgggtttcggtgacgatagagatagcgcggcggcccccggtggaggcctgctgatcaacttctttgatcagcccgcgttcgataagctgacgcgtaattttggttacgctggcgggggcaagctggctttgctcggcaatctgaatccgcgagattggcccgtactggtcaatcaggcgataaaccgccgcgctgttaagctgttttacgagatcaacattacctatctgagcttgtccgcctggtgtcatactttctcttattgagttacgacctcgttaccgttaacgatggtcttggtgattttaaaatcaggtgtgaatgcggtcaggttggctactttacctgcggcgagtgtgccgagacgtttctcaacgccaatcgcacgcgccggatagagcgtcgccatacgcagcacttcatccagtgcgataccgcaatgttcgaccagattacgcacgccttcaatcatggttaaggatgaaccgcttaacgtaccgttctcatccacacaaagtccgttacggtagtatattgttttacccgcaaaaatgaactgttcaatgttggcacctgctggcgcggtggcgtcggtaaccagacacagtttgtcgcctttaaggcgtttagcattacgaatgttggcgtaatcaacatgcaggccatcagcgataataccgcaataaatgtcagcttcatcgaggatcgcgcccgccaggcccggttcacgaccggtaatatacggcatcgcgttgtacagatgggtggcaaaggtaatccccgcgcggaaaccggctttcgcttctttcaacgtcgcgttggagtgaccggcagaaaccacaatcccggcatttgccagtttgctgatgacttccgcaggaaccatttccggtgccagggtcactttggtaatgacgtcggcgttttcacacaggaaatcgaccagcgcggcatcaggcttacgcacaaaattcggattatgggtaccttttttcaccagattcagccacgggccttccagatgcagacctaacgcctgattcggatgttttgccaggtactcgcgcataacgcgcacgccctgtttcatcagctcatcgctggtggtgataagcgtcggcagatagttagtacagcctgatttctcattggctttctgcatgatttccagcgtttccacgctgaccgcttcagcggtgtcgttaaactgtacgccgccgcagccgtttaactgcacatcgataaaaccgggggagagaatggccccgttcagtgaacgttgttcgatctctggcggcagttccgctaccggacagacgcttttaatcaggccatcagcgataacaaccgcgtggtcatcaagaaattcgtggccggtaaagatccggccctgggttaatgcatacattctgacccccgattttaaaaaatattgccctgagcaaggagccagggcagggataacaattacagacctttgatattttctgcttctaattcattgaaatatcttaaagtcttaactttcagctccatggtggaaggctcatcgcacaccatgatggctttcggatgcagttgcagacagctgatggtccacatatggttcacgcaaccttcaactgcggcctgcagcgccagtgctttctggctacccagcaccagaatcatcacttnttcggcatccagcagtgtaccaacaccgacagtcagggcatattttggcacctgattgacatcgttatcaaagaaacgagagttcgcgacgcgagtgtcatgagtcagggttttgatacgagtacgagaagccagagaagacgccggttcgttaaatgcaatatgaccgtcgttacctacaccgcccataaacagatgaatttttccgtaagaacggattttttnttcatactggcggcactcggcgtcgatatccggggcgttgccgttgagaaggttgatgttttctgctggaatatcaacgtgatcgaagaaattacggtgcataaagctgtagtagctttccggatgctctttcggcagaccgacatattcgtccatgttgaaggtgacaacgtgcttaaagctgacctggcctgctttatgcatttcgactaacgctttataggtggtcattggcgtgccgccagttggcaggcccagaacaaacggacgatcagcagtcggtttgaacgcattgatacgattgacgatatggcgagcagcccatttgccgacctgttcagcggtagtcagggggatcagtctcattattcacctcaataagtaaaatgtaagccgttggcggattaggcatctttaagcgtaacctggatttgcgcagacaggcgtcaatccgacctgattttttgaatgataaaataagttttctggtttagccagtaaaagggagtgatgataacgatatttggtgacaaaactcacaaaagacacgngtttaatttgcgatacgaattaaattttcacacactctgtggcagatgatctaacaatctgattacagaacatcggcagtacaatttgcagcacaataaaaatacggctttaaacgagccaaatagggttctcgtagggggaataagatgaatattttaggttttttccagcgactcggtagggcgttacagctccctatcgcggtgctgccggtggcggcactgttgctgcgattcggtcagccagatttacttaacgttgcgtttattgcccaggcgggcggtgcgatttttgataacctcgcattaatcttcgccatcggtgtggcatccagctggtcgaaagacagcgcaggtgcggcggcgctggcgggggcggtaggttactttgtgttaaccaaagcgatggtgaccatcaccccagaaattaacatgggtgtactggcgggtatcattaccggtctggttggtggcgcagcctataaccgttggtccgatattaaactgccggacttcctgagcttcttcggcggcaaacgctttgtgccgatcgccaccggcttcttctgtctggtgctggcggccatttttggttacgtctggccgccggtacagcacgctatccatgcaggcggcgagtggatcgtttctgcgggcgcgctgggttccggtatctttggtttcatcaaccgtctgttgatcccaaccggtctgcatcaggtgctgaacaccatcgcctggttccagattggtgaattcaccaacgcggcgggtacggttttccacggcgacatcaaccgtttctacgctggtgacggcaccgcggggatgttcatgtccggcttcttcccgatcatgatgttcggcctgccgggtgcggcgctggcgatgtacttcgcagcaccgaaagagcgtcgtccgatggttggcgggatgctgctttctgttgctgttactgcgttcctgaccggtgtgactgagccgctggaattcctgttcatgttccttgctccgctgctgtacctcctgcacgcactgctgaccggtatcagcctgtttgtggcaacgctgctgggtatccatgccggcttctctttctctgcgggggctatcgactacncgttgatgtataatctgccggccgccagccagaacgtctggatgctgctggttatgggtgttgtcttcttcgctatctacttcgtggtgttcagtttggttatccgcatgttcaacctgaaaacgccgggtcgtgaagataaagaagacgagatcgttactgaagaagccaacagcaacactgaagaangcctcaatcaactggcgaccaactatattgctgcggttggcggcactgacaacctgaaagcaattgacgcctgtatcacccgtctgcgccttaccgtggctgactctgcccgcgttaacgatacgatgtgtaaacgtctgggggcttctggggtagtaaaactgaacaaacagactattcaggtgattgttggcgcgaaagcagaatccatcggcgatgcgatgaagaaagtcgttgcccgtggcccggtagcagctgcntctgctgaagcaactccggcaactgccgctcctgtagcaaaaccgcaggctgtaccaaacgcggtatctatcgcggagctggtatcgccgattaccggtgatgtcgtggcactggatcaggttcctgacgaagcattcgccagcaaagcggtgggtgacggtgtggcggtgaaaccgacagataaaatcgtcgtatcaccagccgcaggaacaatcgtgaaaatcttcaacaccaaccacgcgttctgcctggaaaccgaaaaaggcgcggagattgtcgttcacatgggtatcgataccgtagcgctggaaggtaaaggctttaaacgtctggtggaagagggcgcgcaggtaagcgcagggcaaccgattctggaaatggatctggattacctgaacgctaacgcccgttcgatgattagcccggtggtttgcagcaatatcgacgatttcagtggcttgatcattaaagctcagggccatgttgtggcgggtcaaacaccgctgtatgaaatcaaaaagtaatctgctttatgcctgatgcgacgcttgagcgtcgcatccaacaatgacaagcggtggagatcttctctgccgctttttttttcatcaatcatccccataatctcagtgagattttcgattttcactaactaacagttgtcagcctgtcccgcttataagatcatacgccgttatacgttgtttacgctttgaggaatccacgatgagtgaggcagaagcccgcccgactaactttatccgtcagatcatcgatgaagatctggccagtggtaagcacaccacagtacacacccgtttcccgccggagccgaatggctatctgcatattggccatgcgaaatctatctgcctgaacttcgggatcgcccaggactataaaggccagtgcaacctgcgtttcgacgacactaacccggtaaaagaagatatcgagtatgtcgattcgatcaaaaacgacgttgagtggttaggttttcactggtctggtaacgtccgttactcctccgattattttgatcagctccacgcctatgcgatcgaactgatcaataaaggcctggcgtacgttgatgaactgacgccggaacagatccgcgaataccgcggcaccctgacgcagcctggtaaaaacagcccgtaccgcgaccgtagcgttgaagagaacctggcgctgttcgagaaaatgcgtaccggcggttttgaagaaggtaaagcctgcctgcgtgcgaaaatcgacatggcttcaccgtttatcgtgatgcgcgatccggtgctgtaccgcattaaatttgctgaacaccaccagactggcaacaagtggtgcatctacccgatgtacgacttcacccactgcatcagcgatgccctggaaggtattacgcactctctgtgtacgcttgagttccaggataaccgtcgtctgtacgactgggtactggacaacatcaccattcctgttcacccgcgccagtacgaattctcgcgcctgaatctggaatacactgtgatgtccaagcgtaagctgaacctgctggtgaccgacaagcacgttgaaggctgggatgacccgcgtatgccgaccatttccggtctgcgtcgtcgtggttacactgcggcttctattcgtgagttctgcaaacgcatcggcgtgaccaagcaggacaacaccattgagatggcgtcgctggaatcctgcatccgtgaagatctcaacgaaaatgcgccgcgcgcaatggcggttatcgatccggtgaaactggttatcgaaaactatcagggcgaaggcgaaatggttaccatgccgaaccatccgaacaaaccggaaatggggagccgtcaggtgccgtttagcggtgagatttggattgatcgctccgatttccgcgaagaagctaacaagcagtacaaacgtctggtgctgggtaaagaagtgcgtctgcgtaatgcttatgtgattaaggcagaacgcgtcgagaaagatgccgaaggtaatatcaccaccatcttctgtacttatgacgccgataccttaagcaaagatccggcagatggtcgtaaagtcaaaggtgttattcactgggtgagcgcggcacatgcgctgccggttgaaatccgtttgtatgaccgtctgttcagcgtgccgaacccaggtgctgcggatgatttcctgtcggtgattaacccggaatcgctggtgatcaaacagggctttgctgaaccgtcgctgaaagatgcggttgcgggtaaagcattccagtttgagcgtgaaggttacttctgcctcgatagccgccattctacggcggaaaaaccggtatttaaccgcaccgttgggctgcgtgatacctgggcgaaagtaggcgagtaattttaagtttcgctatgccggatggggcgtttacgtcgcatccggcaaggaacagacaaacagtttcaaacgctaaattgcctgatgcgctacgcttatcaggcctacatgatctctgcaatatattgagtttgcgtgcttttgtaggccggataaggcgttcacgccgcatccggcaagaaatatgcaaacaatccaaaacgccgcgttcagcggcgttttttctgcttttcttcgcgaatnnnnnnnnnttcgcaatttatccataaaataaatttaaaaacacaaaacataattagataaaatgtaaccgctttcatcttgctggaatttcacgcttttattcttctgcaagcctttcaaccgcaaacttaagccttgtaacaaaaatcatcaaaatatgtgcggttgctcatgttcttacattctggttacagaaagagattgataattcgcgtcgcgaaaaatagtctgttcctgtagtcagcgagacttttctcaacgctacttttttaatttttatttttttcgctgttcacctgtggtgcagcaatttatacgtcaaagaggattaacccatgcgtacgtttagtggcaaacgtagtacgctggcgctggctatcgccggtgttacagcaatgtcgggctttatggcaatgccggaggctcgcgccgaaggattcattgacgattcaaccttaaccggcggtatctattactggcagcgtgaacgcgaccgtaaagatgttaccgacggcgataaatacaaaaccaacctttctcactccacctggaacgccaacctcgattttcagtccggttatgctgctgatatgttcggccttgatattgccgcgtttacggcgattgaaatggcggaaaacggcgacagctctcacccgaacgaaatcgcgttttcaaaaagtaataaagcctatgacgaagactggtccggcgataaaagcggtataagcctgtataaagcagcggccaaatttaaatacggtccggtgtggcgagggtaggttatattcagccaactggtcaaacgctgttagcgccgcactggagctttatgccgggtacttatcagggtgcggaggccggggcgaattttgattacggcgatgctggtgcgttgagtttctcctacatgtggaccaacgaatacaaagcaccgtggcatctggaaatggatgagttttatcagaacgataaaaccaccaaagttgattatctgcactcccttggggcgaaatacgacttcaaaaataacttcgtactggaagcggcatttggtcaggcggaagggtatatcgatcaatactttgccaaagccagctacaaatttgatatcgccggtagcccgttaaccaccagctaccagttctacggtacgcgcgataaagttgacgatcgcagcgtcaacgatctttatgacggcaccgcctggctgcaagcgttgacctttggttaccgggcggctgacgtagtggatttgcgcctcgaaggcacctgggttaaagctgacggtcagcagggatacttcctgcaacgtatgactccaacctacgcttcctcgaacggtcgcctggatatctggtgggataaccgttctgacttcaacgccaacggcgaaaaagcggtcttcttcggtgcgatgtatgacctgaaaaactggaatcttccaggcttcgccatcggcgcttcctacgtttacgcatgggatgctaaacctgcgacctggcagagcaatccggatgcgtactacgacaaaaaccggactattgaagagtctgcatacagcctggatgcggtctacaccattcaggacggtcgcgccaaaggcacgatgttcaaactgcacttcaccgaatacgacaaccactccgacatcccaagctggggcggcggttacggcaacatcttccaggatgagcgtgacgtaaaatttatggtaatcgcaccattcaccatcttctgatgcccgacgcggcaggttttgtgcctgccgcacgtttgaggaatttgctatgaaaaaactgattctcatcgccatgatggcatcggggctggtagcttgtgcgcaatcaaccgcgccacaggaagacagccgtctgaaagaggcatacagcgcctgtatcaacaccgcacaaggttcgccggaaaaaattgaagcctgccagagcgtgttaaacgtgctgaagaaaaagaaacaacatcagcagtttgccgaccaggaaagtgtccgcgtactggattatcagcagtgtctgcgtgcaacgcaaaccggaaatgatcaggcggtgaaagccgattgtgataaggtctggcaggaaattcgcagtaataacaaataagtgagagctgtaactctcgcttttcttatttcccttgcataaaaaagccaacccgcaggttggcttttctcgttcagactggcttatttgccttcgtgcgcgtgctcatcttcgcggcaatcgccttcggcgcagtgaccgtaaagatagagactgtggttagtcaggcgaatgccatgttttgcggcaatttcacgctgacgcgcttcgatggaatcatcactaaattcgataaccttgccgcagtcgaggcagatcaggtgatcgtggtgatgttgctgtgtcagttcaaatacggatttaccgccttcaaaattgtggcgggtgacgataccagcgtcgtcaaactggttcagtacgcgatataccgtagccagaccaatttcttcacccatatcgatcagacgtttgtataaatcttccgcactgacgtgatggttgtccggctcctgaagaacttccaggatttttaaacgaggaagcgttactttcaggccagctttctttagggcggtattgttatcagtcatgcggaatcnnnncctgttactaagcggttcacttcattagaagaagtgacagaatttgctcttgagataatgcggtatcattatagaattgccacgcctaaatgaaaaccacaagtccctggcaaatattgttaataaaaacgtggcacagcttacatttacaacggcaaggccacttgaacaccgggacattgtacaggtacaacggcaaaagttacaaatttgtagcaattattttgattggcattatctattaatacggcgtagacatgagtctacgccgcatcacatcaggcattgagaatttcgtcgagatgcaactcttcagaaatctgtttaacccatttttctacacgttcagcggtcagttccggctgacggtcttcgtcgatagccagaccgacaaagtggtcgtcatctgccagaccttttgatgcttcgaaatgatagcccgcagttggccagtgaccaacgatggtnnnnccgcgcggttcaatgatgtcgcggatggtgcccaatgcgtcgcagaaatattcggcgtaatcttcctggtcaccacaaccaaacagcgcaaccagtttgccattgaaatcaatctcttcgagagtcgggaagaagtcatcccagtcacactgcgcttcgccgtaataccaggttgggatgcccagcagcagaatgtcataagcttccagatcttctttgctgctttttgcaatgtcatggacatcggcaacgtctttaccaagctgtttttgaatcatttttgcgatattttcggtattaccggtgtcgctgccgaaaaagatgccagtgatagccatgagtgaaataacctcttgaaacttattgaaatgggggtggaaaattgcccacggataaaggcaatcatagcagaacaggcagtcttgcggaatcagcaaacgagcaggactgcacactgtgctacatgaaagtggaaatttaaacgatgccctgactacgcagcgccgccagttgctgcattaacatctcttcgatcagttcgctacggctcatattgcgcgattccgccagctcgttcagcgcctcgacagcttccgcgttcagcttcagttcgacacgcttaaggccacgtactttgtcgcgttttagttggttgcgtttattaatacgcagctgttcatcgcgcgaaagcggatttgttttcggtcgtcccggtcgacgctcgtgcgcgaacagatctaatgtcgtacggtccgtttgttctttggccatgatcttggtgacttcgggggaaacaatcagccaggcctctgcccggatggatagcgcgccataatacatcagcgcgatgagtcacgccaacgcccacgcgcggaaagcgacgcggacgctgggtttttaatcagttgcgttaatcattgagatagcgacggatagcgcgtaataccgcatccggtttttcagcatggacccagtgacccgcgcctgcaatcacatgcgcccgtgcctgtggaaattgtgccagtaaatcatcacggtactgctcgctaacatacggagaattaccaccagggataaacagggcagggtgatcccatgccgggattttctcccaacccacaatatgcggatactgatcccacaataccggcacgttaaagcgccactccccgtcaacaaaagatttcaacagaaactgaatcaccccttcttcattaagatgctggcgcattattgctgctgcttgctggcgagtttgtgcgtccgattcactgaccgcgttgatagccgagaaaatctcatcatgacggcgtacgtgatagtcgaccggtgcgatatcgatcgccaccagtttatcgatgcgatcgggggccagtgcagtaagtgccattaccgctttaccgcccatggagtgaccgataaatgttgctttgtcgatctgctgtgcatccagagtatcaacaagatcctgcgccatcgccgggtaattcattaccggatctctcggtgaaagaccgtggttacgcatatcaacctggatgatattgtgatcgtttaccagatcgcgagccagtacgccaaggttgtcgaggctgccaaacagaccatggacaagaacgatgggagaattattgtgctggttttgtgcagtttgcgcgcggatattcaatttcatggcaaagttctttttttcgcgttgtcgggttagggtattatgttgaccattgtgccacagggctgcaacaaataaggtttattccgagtttttctgcaagccaggcttgacgctatccgctgccgggatttattcatatactcctggcgacttgtattcagctaagacactgcactggattaagatgaaaacgattgaagttgatgatgaactctacagctatattgccagccacactaagcatatcggcgagagcgcatccgacattttacggcgtatgttgaaattttccgccgcatcacagcctgctgctccggtgacgaaagaggttcgcgttgcgtcacctgctatcgtcgaagcgaagccgatcaaaacgattaaagacaaggttcgcgcaatgcgtgaacttctgctttcggatgaatatgcagagcaaaagcgagcggtcaatcgctttatgctgctgttgtctacactatattctcttgacgcccaggcgtttgccgaagcaacggaatcgttgcacggtcgtacacgcgtttactttgcggcagatgaacaaacgctgctgaaaaatggtaatcagaccaagccgaaacatgtgccaggcacgccgtattgnnnnnncaccaacaccaacaccggccgtaaatgcagcatgatcgaacacatcatgcagtcgatgcaattcccggcggaattgattgagaaggtttgcggaactatctaaaacgttgcagacaaaggacaaagcaatggcaatccacaatcgtgcaggccaacctgcacaacagagtgatttgattaacgtcgcccaactgacggcgcaatattatgtactgaaaccagaagcagggaatgcggagcacgcggtgaaattcggtacttccggtcaccgtggcagtgcagcgcgccacagctttaacgagccgcacattctggcgatcgctcaggcaattgctgaagaacgtgcgaaaaacggcatcactggcccttgctatgtgggtaaagatactcacgccctgtccgaacctgcatttatttccgttctggaagtgctggcagcgaacggcgtagatgttattgtgcaggaaaacaatggcttcaccccgacgcctgccgtttccaatgccatcctggttcacaataaaaaaggtggcccgctggcagacggtatcgttattacaccgtcccataacccgccggaagatggtggtatcaagtacaatccgccaaatggtggcccggctgataccaacgtcactaaagtggtggaagacagagccaacgcactgatggccgatggcctgaaaggcgtgaagcgtatctccctcgacgaagcgatggcatccggtcatgtgaaagagcaggatctggtgcagccgtttgtggaagggctggccgatatcgttgatatggcggcgattcagaaagcgggcctgacgcttggcgttgatccgctgggcggttccggtatcgaatactggaagcgtattggcgagtattacaacctcaacctgaccatcgttaacgatcaggtcgatcaaaccttccgctttatgcaccttgataaagacggcgcgatccgtatggactgctcctccgagtgtgcgatggcgggcctgctggcactgcgtgataagttcgatctggcgtttgctaacgacccggattatgaccgtcacggtatcgtcactccggcaggtttgatgaatccgaaccactacctggcggtggcaatcaactacctgttccagcatcgtccgcagtggggcaaagatgttgccgtcggtaaaacgctggtttcatctgcgatgatcgaccgtgtggtcaacgacttgggccgtaaactggtagaagtcccggtaggtttcaaatggtttgttgatggtctgttcgacggcagcttcggctttggcggcgaagagagcgcaggggcttccttcctgcgtttngacggcacgccgtggtccaccgacaaagacggcatcatcatgtgtctgctggcggcggaaatcaccgctgtcaccggtaagaacccgcaggaacactacaacgaactggcaaaacgctttggtgcgccgagctacaaccgtttgcaggcagctgcgacttccgcacaaaaagcggcgctgtctaagctgtctccggaaatggtgagcgccagcaccctggctggtgacccgatcaccgcgcgcctgactgctgctccgggcaacggtgcttctattggcggtctgaaagtgatgactgacaacggctggttcgccgcgcgtccgtcaggcacggaagacgcatataagatctactgcgaaagcttcctcggtgaagaacatcgcaagcagattgagaaagaagcggttgagattgttagcgaagttctgaaaaacgcgtaaacacattaaataagaaaaagggcggtcgcaagatcgcccttttttactttgcttttttaaccgtgtttatttttcagttcaaagcgtggtgataccagaccatacagtgtccaaccaaggaaggtcacgatggaaccgtacagcatggcttcttccccggatgagtacagcgcataaaagctgtacatcgcgccaacaaaagcaacaaagtttgcaactttcgcttttgaggggggcacattagcgaccttctgaataatgactaatgccgccattgacagaatatacggaatgatattggtcaccacggccaggttaaccagcacgttgaactgactgtttagcgacgggctaatcgtcatcagcgccaacccgctctggataatcacaatggtcaacattccctgcaccggtgcatccactttggttacatgggagaaaattttagggaagtagccttcatcagatgaagatttaaacacctgggcaatggtgaactgccagccaagcagcgaaccgcagcaggacatcaccatcagcgccataatgactttacccacttccggcgtgaacatctgcgcgaaggccagaccaaatggtgccgttgaatttgccagctccatatttggcacaatcccggcaatcacgttggtggagacgatataaatcaccgccgcacctaacgtaccgccgagtaccgcgattggcacattacgttccgggttttccactacatcagtatttgcacacgcagactccagaccaagaaaagcccacagcgtcatagcgatggaagaacctaccgcactgaagaacggtgcatgatgcggattccaggaatcaacgtacagcgtcgggctaaaccagaaccagccaataatgcacagaccgacgaccggaataatgactccccacacagtaatgctactgatttgcccggtaatgcgcgcaccaccaaagttagccacggtacaaatccacagcaccccgatggtcgcaagaccaatctgcactggcgacaaactcgcgccgagcagttcggtgccgtaaccaaccgccgaaatagcaatcgcgacgttagcaatcagcagtgagacgccgtaggtatagttcgccataaagttaccggatttaccgaaagcatactcggcataaccgcccataccgcctgatttacggctgaacataccgcattttgcgaatgcccatgccagtgccattgagcctacggctgtcaccagccaggagataattgagattgtcccaacttcggcaagctttgtcggcagcatgatgataccggagcccatcatgttgaccatcgtcagtatggttaactgaacgacgcccattttgttcgatttagcctgactcataatttttcccctttcagcagggtgctttgcgcatcacgaggcttgatgacatagcaccaaacttgcttacgaccatcatgttcttcgatatagacaccctgcagctccggtgcaaaacctggcagcaggttgatcccttcttccagagcgctgaagtaacgcaaaacagcaccaccccagatttcacccggaacaacacacagcacacccggaggataaggaagcgcaccttcggcagcgatacggccttctgcatccggcagacgaaccagctccacttcaccgcgtaaataggcgtagttagcttcttgcggattcatgctgacgcgtgggaagtgttccttacggaacatctctttttgcagttgtttcacgttgtggcgggcatacaaatcatgcatttcctggcacaactgacgaagggtataaccggcgtagcgctcttcatgctgtttgtagatggaaggtagcacttccgccagcggcgcatcagattccagcagtttttcgaagcgtaccagcagggcaacaagttgctgaagtttggccatatcttctgccggagtcagcaggaagaggatggagttaagatcgcatttttccggcactacgccattttcgcgcaggaagttagcaagaatcgtcgcgggtacaccgaacgcttcatattcgccgttacgtgcatcaatacctggggttgtcagcaacagtttgcacggatcaacaaagtattgattctctgcataaccttcaaaagaatgccagtgctcacctggtacaaactggaagaagcgcagatcaaccgcaatttgcgctgtttcatacgactgccagggtttaccatccaccagttcaggtatgaacggacgaatatgctgacagttatcgaggatcagtttgcgggcattaatgccatttaccacacaatccatccacatattacgaccgctgacaccttcatgcattttggcgttgatatccagtgcggcaaacagcggatanaacgggctggtggaggcatgcatcataaaggcgttgttcatgcgtttgtgcggtacataacgctgttgccctttgatgtggctgtcttttttatggatttgtgaagtttgagaaaaaccagcctgctgtttatgtacggattgcgtaaccagaatacccggatcgttctcattaagatccagcaacagcggcgaacagtcagccatcatcggaataaactgttcatagccgacccatgcggaatcaaacaggatgtagtcacacagatgaccaattttatccaccacctggcgggcgttataaatcgtaccgtcgtaggtgcctagctgaatcacagcgaggcggaacggacgcgcntcttttgcccgttgcggtgcaacttctgtaatcagttcacgcagataactttcttcgaagcagtgtgcatcaataccaccgataaaaccatacgggttacgtgctgtttccagataaaccggtgttgcaccagcctgtagcaaggccccgtggtggttagacttatggttattgcggtcaaatagcaccagatcacccggtgtcagcagggcgtttaaaaccactttgttagaagatgaagtgccatttaaaacgaagtaggttttatcggcattaaacacttttgctgcatgttgctgtgcaatgcatggcgcgccttcgtgaatcagcagatcgcccatcgctacgtcggcgttgcacaagtcggcacggaacagcgcctcaccaaagtattccacaaactgattccccgccggatggcgacggaaaaattcgnnnncctgatgaccggggcagtcaaatgcgctgttgccctgattgacataatcgaccagtgcgcgaaagaaaggtgggcgcagttgagtttcataatggctggcagcggtttctaactgacgaccataaaattctttgcgtgcttctccatgttcgaagacaccagaaatacgtgaaagatattctgctggtatacgttcttcattttccgttgcaataaaaacaggaatgtcatagccagtagcgtctatttcatcgagttttccacgttcaacatcactgactgataaaataatggcggcaacgtcaatataattactttcgtctatattcacgcatgcacgatgagtggaaaaacaatccgggcaagaacgactaacggcaatttttaattctgacattttgttcatctctttatttcaggtaatagcaggtcctcaatttctcaaaggagaaatcgatcacgccggaaaaaaagcaaagctccaccgctgataaataaatcagtagtttgctttttgcagatgcaataacccagaccagcccggtaactggctatactcgtcatacttcaagttgcatatgctgcgactcgaattatgtagagtttaaaagggttagcagtatatgagcaccgagggatacaggtattaacctgtaatgcttaaagtcagggagacctgtacgctggggtgccctttagtcagaagactagcgggcattaaagaaatgaaagtcaaaactattacgatgggcaaacttcatgatatgggttgtccgccttatatgaggcattaagcggttattattttccatttacctttacctcttgctgtgtcagttgaaggtagagttattctatccatgaaatggctataatctgtgaagaagatcaacaaaaaacgatcataccccagataataaatcattaattatgaatagcgccatactagatgctgttttgttacttaaatgttgtaatttcgtgttttatatttgcgttaagaaattaaacctgccaaataataatatttggcgcaggtttaataataaattaatcactatttaggcgaatttattgaataaaaattcaaagcataaaccgataaccaataccggtttcagtaatgaaatggctggggcgagcgggatcctgttccagtttttgtcgcagatgtcccatataaatacgcaaataatgactgtgttcgaccgcgtttggcccccacacctggttaaggagttggcgctgggtgagcacttttccggcgttgttgagcagcactgccagcaggcgaaactcaatcggggtgagatgcacctcttcctcaccccggtgaatcacgcgggcggctaaatcgacggtaacatcggaaaatttcaccagcggatcgggcgcggcggtggcggagtggcnnnntaaagcgacgcgcagacgggcctgcaattcgccaatgccaaacggcttacttagataatcatccgctccggcatccagcgcggcgattttgtcgctctcttcgctgcgtgcggaaagcacaatcaccggcaccgcgctccactggcgcaggtcgcggataaactcaatcccatcaccatcgggcaggccgagatcgagaataatcaaatctggcttacgggtagccgcttccagcaagccgcgttgcagcgtttcggcctcatagacgcgcatcccgtcgccntccagcgccgtgcgcagaaagcgacgaatagcctgttcatcttcaacaatcagaacgtttgtcacatatcctcatgaaattcttcaagttcaggggcagtttgctggggaagtgtaacacgaaaacaggcaccaccttccggccggttgaacgcggtaatagtgcccccgtgtacatccactatcgcccgacaaattgccagtccaagccctacccccggtactgccgactctttattcccgcgagcaaacttatcaaatatcgtctgctcctggcctggcggaagaccggggccgttatcccagacatccagttgtagattttcgccctcaacgtgggcatcgataccaatttcggcctgcgcacccgcatatttcaccgcgttctccagcagattaatcagcacccgttcaaagagtggcccgtcaacgtggattaaggtcagcggttctggcagagaaagattgatgggcgacgataaacccggttccagcatttgcagcgcgctgccgactacttcttccagcgttaaccactctttcttcaaattaaagccgccggactgaattcgcgccatatccagtagattattcaccagtcgggtagtgttcagcacatgctgacgaatctcgctggcctggcgggcgtggggtgatccttcgcttgccagatcgagcgttaagatttctgcctgaccaaacagcaccgtaagcggagtgcgtaaatcatgcgaaagcgccgccagcagggcgttgcggatctgttcacgttcgcttgccatccgcgcctgttcttcgctggcggtcagcgtcagccgctcaagcgcattggcgactaacagcgtaaacgtctccagcaggcgctgctgttccgggatcatcaactgacgcagattccccggttccaccaccaccagcccgtaggttttctcaccgctttttaacggcaaaatctggtacggcacgccgggtaacgtgtcggtgcccgcacccgcaggcaggcctttatcaaaactccactgcgcgatggcatcgtcccacggcgtcattccttgcggatgtgttaacggctgcaatttaccgttgtcatcgggcaacaacacctgactgcgggcatgaaacgtggaggcaataaattgttcgctggtggcggcgatgtcctgcggactgcggcccaccgccagagctttcgacatttcatataagtgccgtgtgcgttgctcgcggtaacgggctacccgcgcctgataacgcacacccgcagtaaggttcccgatcaccagcccgacggttaacatcaccgcgaaggtcagcagatattgcacatcaganacggcgagcgtgccgcgtggggcgataaaaaagagatcgaaactcaccacattaatgacggtagcaaccaccgaaggccagcgtccataaaatagcgccaccaccaccacgccaagtagatacagcatcaccaggttggcggcatcaaacgccatcagccactgcatggcaattaaggtgataacggcgcataacgcggcggcaaccacgcatccctgaatctgtacccgccacttgtctttaaaagagcggctatccggcgcgttgttaatcgtgcgggcgggtggttcatcaagcgcgaccagcacctgatcgagatcgggggcgatgcgcgccagtcggtcagcaaacgtttcccgacgccaccagcggcgcgaggctgggcgaccgagaataatcttgccgagattatgttcacgggcataacgcactaccgctttctcttccgctggatcagaaagtgttgccgtctccgcgcccagctcctgcgccagacgtaaggcgctgagaattgcccgacgttttttctccggtaagcgatgcagggcaggggtttcaacatacaccgcgtgccagacgctccccagccgtgacgccagccgcgccgccgcgcggaccagtttttcgctgccggtgttatggccgatgcataaaaggatcgcgtcgcgcgtgtgccagactttctcttcgccaggatgcccccgccaggcgcgcatttgctcatcaacgcgatcggcagtacggcgcagtgccagttcgcgcagggcgatcagattgcctttgcggaaaaaatgttcaatggcgcgctccgcctgcccggcaatatagactttgccttctttcagccgctggcgcagatcgtccgggggcaagtccaccagcaccacgtcgtcggcggcatcgaaaaaaggatcgggcacggtttcccgtacctgaattccggtgacgccgctgaccacatcattcagactttccagatgctgaacgttgacggttgtgaaaacatcaatgccagcttccagcagttcttcgatatcctgccagcgtttaggatgacgagaacctggcgcattactgtgcgccagttcgtccattaagatcagcgccggacggcgggcgagggcggcatcgagatcaaactcgctgatgtgccgcccacggtacgccaggcgttttggcggcagaacagccagcccttccagcatggcggcggtatctttccgcccgtgggtttctaccacgccaaccacaatatccagcccttgcgcccgcagtcgctgggcttctgccagcatcgcccaggtcttcccgacgcctgcgcaggcaccgaagaaaactttcagcttcccccgatgcggcgcggcagtttgttccagcagacgatcggggtcgggacgtaagggttcgttattcatcaagtttatccagcgccagattgagttcgacaatgttgacgaccggctggccgatatatttcaccagtggttgttggctgtattttgcgatcagttgcgtgagctgttcaacgctgagattacgcgctttcgctacgcgtgggatctgccaggccgccgcttgcggggtgatgttattgtccagcccgcttgccgacgccgtcaccagttcaaccggaacgctcgtgctggcattcgggttagcggcccgtaatgcagcaacgcgtgcggctattagtttatccagctcagggttactgaccgccagattgctcccgccagaagcctgtggattataaggcatttctgccgttgccgacgggcgaccatgaaaatagccgttgtcggtaaaattctgcccgattaatgccgaaccccgcaccgtatcaccttcacggatcaacgaaccgttggcctgccagggaaaccaccattgccccagcgcggtggtcagcagcgggtaaacaccgccagtaatcaataacagaaagataaatgtcgataatgccggacgtaatccacgcatggtaaacctcacaccagaccgcaaacggtcagtagtaaatcaatgactttgataccaataaacggcaccagcagcccacccagaccgtaaatccataagttacggcgcaacatggcagaagcggtaagcggtttataactcacgccttttaacgccaggggaatcaaaaagacgataatcaaggcgttgaaaatgaccgcactgagaatggcggagtcgggcgaatgcaggcgcatgatgttcagcgcatttaactgtggatacgttaccgcgaatgccgccggaataatggcgaagtatttcgccacatcgttggcaatgctgaaggtggtcagcgagccacgggtcatcagcatctgtttgccaatatgtaccacctcgatcaacttggtcgggttagagtcgagatccaccatattgcccgcttctttcgccgcctgagtaccggagttcatcgccaccgcgacatctgcctgcgccagcgccggagcatcgttggtgccgtcgccggtcattgctaccaaacggccttccgcctgatactgacggatcaatgccagcttggcctccggtgtcgcttcggcgagaaaatcatcgacgcccgcttccgcagctatcgcggcggcagtcagacggttatcgccggtaatcatcaccgttttaatacccattttgcgcagttgggcgaagcgttctttaatgccgcctttgacgatatctttcaacgcaataacgcccagcacacgagaaccttctactactaccagcggtgtggccccctgacgcgcaacctgatcgactttttgatcaacatcggcagggaagtgaccaccgttagcctcaacatggcggcgaatggcatcgacagaacctttacggatcatgcggttgtcgatattgatcccgctcatccggctttgcgcagtaaacggtacaaaggtggcatggagcgactgcacatcgcgctcgcgcaggttaaaacgctgcttggcgaggatcacaatactgcggccttccggcgtttcatcagccagcgaagccagttgtgcggcgtcagccagcgttttttcatccacgccctnnnnagggataaactccgatgcctgacggttaccgagtgtgatggtgccggttttatccagcagcagaacgtcaacgtcacctgccgcttcaactgcacgtccgctggtggcaaccacattcgcgcccagcatccgactcatcccggcgacgccgatcgctgacaacaggccgccaatagtggttgggatcagacagaccagcagcgccaccagtaccgttacgctgactgcattaccgccccacgcggaaaacggccacagcgtggcggttgccagtaaaaagacgatagtcagggcaatcagcaggatggtcagggcaatctcgttcggcgttttgcgtcgctgtgcgccttccaccatcgcgatcatccgatccagaaatgtctcgccggggttaacgctacactcaatcaccagccagtcagaaagaatacgcgtgccgccggtgacggaggcaaaatcgccgccggattcacggatcaccggtgccgattccccggtgatggcgctttcatcgaccgatgcgccgccttcaataacttcaccatcgcaggggataatatcgcctgcttctaccagtacgatatcgcctttacgcagttgatcggcgggaactttgtccgccgcagcgccatatttcggctcacgcagcttgcgggcaaaggccgtttttttcacccctttcaggctgttggcctgcgctttactgcggccttctgccagcgcctcggcgaaattagcgaacagtacggtgacccacagccagccgctaatggccacgctaaacagcgcattgccaggcatcgcgccgcttgccatcgcgatgctaatacaggtggtcagcagactgccgatccagacgataaacatcaccggattgcgccattgcgcctgcgggtttaattttttcaccgcttctttcagcgcctgaacgacaagtgttggttcgaatagcgccagttgtttacgactcatattcagtgctcactcaatatcatcaggagagatattccgccaccggaccaagcgccagggcagggataaaggtcagtgcgccaaccagcaacacggtgccgattaacaggccaacaaacagcgggccgtgcgttggcagcgtgccggagctggcgggttggctctttttactcaccagcgaaccggcaattgccatcaccgggataatcaccccgaagcgaccgacaaacatgcagaacgccagtaaacagttccagaacggagagttggcgcttaatccggcaaaggcgctgccgttgttgttagcggcggatgacacggcgtacagcacttcgctaaaaccatgcgggccagggttgagcatggcgctacgtccggcgtcggtcatcattgccagcgccgcgcccatcagcaccagcgtcggggtgaccagaatcgccagtgcagtcagtttcatctcacgtacgtcgatttttttacccagatattccggtgtacgaccaatcatcagcccggcaataaacaccgccagcaggacaaacagcatcatgccgtaaagaccagaaccgacaccgccgaataccacttcaccaatttgcatcagccacatcggcaccatgccaccgagagcggtaaacgaatcatgcattgcaatcaccgcgccacaggacgccgccgtagtcacgaccgcaaacaggntactgaccagcacgccgaaacggctctctttaccttccatattgatgctgctgtctgcgccgagcgccagcagatgaggattaccctgaacttctgcccacatcaccacgcctacgcagatgacaaaaatcactgacatcgcccacagcaacatgcgcccctganggcgatcgcccgtcacttcaccaaaggcaaagcacagcgctgttgggatcaagaagatcgccagcatctgcacgaagttggtcagtgcggttgggttttcaaacggatgcgacgagttggcattaaagaaaccaccgccgttagtgccgagcatcttgatcgcttcctgagaagccaccggacccattggtaacagctgttgcgctccttcaacggtattcactgcctgatagggcagaaagttttgcagcgcaccttgttgaataaaaaacagtgcgatcaccaacgccacagggacgagcacccataacgtgatgcgtagcagatcgacccaggcattcccgagtgtgctcatgctctggcgggtaaatgcacgaatgagggcaaaaatcaccgcaatcccgctggcggcagaaagaaagttttgcaccgttaagcccgccatctggctgaaatagctcaacgtggtttcaccgctataagattgccagttggtattcgtgacaaagctgacggcggtattcagcgccagatcccacgacagccccggcaactgctgtggattaagcggcagatagtgctgaccgagcaacataaaaaacagcaccgccagccccagcatgttcaggccgagaatggcacagagatactgcttccagttcatctcatggttagagacgccaagcgcgctaaagagtacgcgttcaacgcccgtcgtaccaggaagaggaatatcattaatcagccacgccagcccgctacctaagggacgcgccagcaccattaataccagtaaaaacgtggcaatcagtaagaacccttgcgcagccatcagaatgcctccgcatggatcagggcataaaccaaataacccagtaataaaaacaccagcaacacgccggctatcacgcctgcactcacagtgcacctccagtggcctaaaagtgataccggaagggtagaattctggctgcaaagatttcgcaaaaatctgcggacggggtgtaaaaaaagtataaaaatggcaaaagccatgatttaactaatgtttagtattaatttaacttttgtgtaacttaattacaggatgaatgtaaataaaccatcaataagcaaaaataagtggtcggatgagtagtaaaattacacaaaaggcggtactattttcatcagataaacaaattcatttttccggtgctattcaccgggtagatacaaaagggggagaaaagtatggaactctacagagaatatcctgcatggcttatctttttacgccgtacttatgcggttgcagcgggcgttctggcgctgcctttcatgcttttctggaaagaccgcgcccgcttttacagctacctgcatcgcgtctggtcgaaaaccagcgataaaccggtttggatggatcaggccgaaaaggcaaccggtgatttttactgattgctgagttttgaatacattgaaaaccgccagcggaaacnntggcgtttttttgtatcaggaagatgttcagaggaatatttagacaccgttataccaatcgaaacatatattcatgaaatatatataaatattttcctaattgtttctatctgacggatatctcacttaaggctttcttataaatctgtagggttttgcctggaagcagacaaataacccgataaaacaaggatgagcagatgagcggaaaaccggcggcgcgtcagggcgacatgacgcagtatggcggtagcattgtccagggttcagccggggtnngcattggtgcccccaccggcgtggcctgttcggtgtgccccggcggagtgacgtccggccatccggtcaatccgctgctcggtgcaaaggtccttcccggtgaaaccgacatcgccctgcccgccccgctgccgttcatcctctcccgcacctacagcagttaccggacaaaaacgcccgcgccggtggggagcctcggccccggctggaaaatgcctgcggatatccgcttacagctgcgcgataacacactgatactcagtgataacggcggcagaagcctgtattttgagcacctgtttcccggtgaggacggttacagccgcagcgagtcactctggctggtgcgcggcggcgtggcgaaactggatgaaggtcaccggctggccgcactctggcaggcgctgccggaagaactccgcttaagtccgcatcgttatctggcgacaaacagtccgcaggggccgtggtngctgctcggctggtgtgagcgggtgccggaagcggatgaggtgctgcctgcgccgctgccgccgtaccgggtactgaccgggctggtggaccgcttcgggcgcacacagacgttccaccgcgaagccgccggtgaattcagcggcgaaatcaccggcgtgacggatggtgccgggcgtcacttccggctggtactgaccacgcaggcgcagcgggcagaagaagcccggcagcaggccatttccggcgggacggaaccgtccgcttttcctgataccctgtcgggttacaccgaatatggccgggacaacggcatccgtctgtctgccgtgtggctgacgcacgacccggaatacccggagaatttacctgccgcgccgctggtgcgctatggctggacgccgcgcggcgaactggcggtggtgtatgaccgtagtggcaaacaggtgcgcagctttacttacgatgataaataccggggccggatggtggcgcaccgtcacacgggccggccggaaatccgttaccgttacgacagcgacgggcgggtgacagaacagctaaacccggcaggcttaagctacacgtatcagtatgagaaagaccgcatcaccntcaccgacagcctgaaccgccgtgaagtcctgcacacgcagggtgaaggcgggctgaagcgggtggtgaaaaaggaacacgcggacggcagcgtcacgcagagtcagtttgacgcggtgggcaggctcagggcacagacggatgccgcaggcaggacaacagaatacagcccggatgtggtgacgggcctcatcacgcgcatcaccacgccggatggcagggcatcggcgttttactataaccaccacagccagttaacgtcagccaccgggcctgacgggctggaaatacgccgggaatatgatgaatggggccgtctgattcaggaaactgcccctgacggcgatatcacccgctaccgttatgataatccacacagtgacttaccctgcgcaacggaagatgccaccggcagccggaaaaccatgacgtggagccgttacgntcagttgctgagcttcaccgactgttccggttatgtaacccgttatgaccatgaccgcttcgggcagatgacggcggtgcaccgcgaggaagggctgagtcagtaccgcgcatacgacagccgtggacagttaattgccgtgaaagacacgcagggccatgaaacgcggtatgaatacaacgccgccggtgacctgaccaccgtcattgccccggacggcagcagaaacgggacacagtacgatgcgtggggaaaagccatctgtaccacgcagggcggtctgacncgcagtatggaatacgatgctgccggacgggtcatccgcctgaccagtgaaaacggcagccacaccaccttccgttacgatgtactcgaccggctgatacaggaaaccggctttgacggccgcacacagcgttatcaccacggcctgaccggcaaacttatccgcagcgaggatgaggggctggtcacccactggcactatgacgaagcagaccgcctcacgcaccgcaccgtgaagggtgaaaccgcagagcgctggcagtatgacgaacgcggctggctgacagacatcagccatatcagcgaagggcaccgggtgacggtgcattacgggtatgatgagaaaggccggctgaccggtgagcgtcagacggtgcatcacccgcagacggaagcactgntctggcagcatgagaccagacacgcttacaacgcgcaggggctggcgaaccgctgtataccggacagcctgcccgccgtggaatggctgacctatggcagcggctggctggcaggcatgaagctcggcgacacaccgctggtggatttcacccgcgaccgcctgcaccggaaanngctgcnnagattcggccgttatgaactcaccaccgcttatacccctgccgggcagttacagagccagcacctgaacagcctgcagtatgaccgcgattacacctggaacgacaacggcgaactcatccgcatcagcagcccgcgccagacccggagttacagctacagcgactccggcaggctgaccggcgttcacaccaccgcagcgaatctggatatccgcatcccgtatgccacggacccggcaggtaaccgcctgcccgacccggagctgcacccggacagcaccctcagcatgtggccggataaccgtatcgcccgtgacgcgcactatctttaccggtatgaccgtcacggcagactgacagagaaaaccgacctcatcccggaaggggttatccgcacggatgatgagcgcacccaccggtaccattacgacagtcagcaccggctggtgcactacacgcggacacaatatgcagagccgctggtcgaaagccgctatctttacgacccgctgggccgcagggtggcaaaacgggtgtggcgacgtgaacgggacctgacgggctggatgtcgctgtcacggaaaccgcaagtgacctggtacggctgggacggcgaccggctgaccacgatacagaacgacaggagccgcatccagacgatttatcagccggggagcttcacgccactcatcagggtcgaaactgccaccggtgagctggcgaaaacgcagcgccgcannctggcggatgcgcttcagcagtccggcggcgaagacggtggcagtgtggtgttcccgccggtgctggtgcagatgctcgaccggctggaaagtgaaatcctggctgaccgggtgagtgaggaaagccgccgctggctggcatcgtgcggcctgactgtggcgcagatgcaaagccagatggacccggtatacacgcnnnnnnnaaaaatccacctgtaccactgcgaccatcgcggcctgccgctggcgcttatcagcacggaaggggctacagaatggtgcgcagaatacgatgaatggggcaacctgctgaatgaagagaactcgcaccagctgcagcagctcatccgcctgccgggtcagcagtatgatgaggagtccggcctgtattacaaccgccaccgctattatgacccgctgcaggggaggtatatcactcaggatccgattggactgaaggggggatggaatttttatcagtatccgttgaatccggttcagtatatagattcaatgggactggcatcaaaatatggacacttaaataatggcggatatggagcgagacccaacaaaccgcctacgcccgatccaagtaaatttccagacatagcgaaacaattaagactgccatatcctattgaccaggccagtagtgcgcctaatgttttcaaaacattcttcagagcattaagcccttacgactacacactgtattgcaggaagtgggtaaaaccaaatctgacttgtacgccacaggatgatccccagtatccagggatggatacaaagacagcaagtgattacctgccacagacaaattggccaacaactcaattaccaccaggatatacttgtgcagaaccctatttattccctgacattaataaacccgatgggccagcaacagcagggatagatgatttgggtgaaattttagctaaaatgaaacagagaacatcgagaggaataagaaaatgaaaagagttttgttttttttgctgatgatatttgttagttttggtgttatagctgattgcgaaatacaagctaaagatcatgattgttttactattttcgctaagggtactattttttccgcgtttcctgtcttaaataataaagccatgtggagatggtatcagaatgaggacatcggtgagtattattggcaaacagaactgggtacatgtaaaaataataaattcacaccaagcggggcgagactcttaattcgtgtcgggtcactacgccttaatgaaaatcatgccatcaaaggaacgttgcaggagttgataaatacagcagaaaaaacggcgtttctcggcgatcggtttagaagttatataagagcgggtatctatcaaaaaaagagcagtgatccagctcagttgttggcagtccttgataattcaatcatggttaaatattttaaagatgagaagccaacttatgctcgaatgacagcacatctcccgaacaaagatgagtcttacgaatgtttaacaaaaatacagcatgaactgcttcgtagtgaagaaaaataaaacatcttcctgagaaaataaattaaccattcggaaaaacatgttcttaatggatatccaggtacaccagaaggtcgatttggaaaaatggattccgatggtaagaatatcatatattctgaatgtaatgttttacccacaacttttgagattcgataggtgtagaacatgagaaactcactaatattacttattatgatattgtttacaatatcacactcagtatttggaaaagaaaatccagtggaaatttaagtaaatagtcgtgaaatggctttggaattatcatatgtttacattaaatatgtatacgggaaagaaaaagcagaatttcagaaaccatatagtattacagatgacaataattgttggaaaatcgagggaaaacaaccgaagaattcaggaggaaattttacaatactaatagcgaaaaaagatgggcaagtgttgaatgtaatacacacaaaataatccactgtacagtcgattcaaatattttaccaaggtgtgtttcgtaacaattttgtgtacaatatgactctacatatcgacgaaaaaaacacttgatttgacaggaatacattcaaaaaantnnnnntttcatttcaggagcgattttcatctgttacttgaagtatctgtgagattaagtgactccccctaacgtcgtactaaatagtaattactggccataccgggagcagtattcggcgctccccacatgcagcagaataaccgcatcagcgaagatgtatttttactatcacaatgtgtacggacggtttatggaaaagaatgaacattagatacgcgatgcggcggcaggttacacggttatcactacgatagccaatactggctggtgcattaccgccgtgaacaataggacgccgtactgctggaaatttcttacctttataactccccgcgccgccgtatcgggaaacgggaagcaatcaagatgaggctgatataatgtgcggaatgcctgagtatttttagaataggggggnaatatgtttgatagaatatatcttggtgatcgagcaataaaaaaattgaatttgatttatggagtaaacaaattagaattcaggttaatttaatctcaaggatagcctatggtacaacagaatggaatttttatgataatgaagacttagaagatggttatttggtattttcaggtgttagtttcttcaatataactcctaatggctctattccaaatgattatataatttcaataattacagataatgtcaatgttgaatattttgaatcaactatagtttcagttggacaaattccaaatacaaattcttgagacattgataatattggtgagtgtcaaattttcatcaggtgtaaacacagctggattgagaataaattcaaagaaaaaataattgaataaccatgttatgtatagacattttagacagggaaagatcattagaagttcactttttgtactaaataattcgcattttatgtttaaaaattgagatactcctcattacctgaagctgttttttattgcttatatatgatcaaatactccttacataattaaggagaacaaaatggaacttaaaaaattgatggaacatatttctattatccccgattacagacaagcctggaaagtggaacataaattatcggatattctactgttgattatttgtgccgttatttctggtgcagaaggctgggaagatatagaggattttggggaaacacatctcgattttttgaagcaatatggtgattttgaaaatggtattcctgttcacgataccattgccagagttgtatcctgtatcagtcctgcaaaatttcacgagtgctttattaactggatgcgtgactgccattcttcagatgataaagacgtcattgcaattgatggaaaaacgctccggcactcttatgacaagagtcgccgcaggagagcgattcatgtcattagtgcgttctcaacaatgcacagtctggtcatcggacagatcaagacggatgagaaatctaatgagattacagctatcccagaacttcttaacatgctggatattaaaggaaaaatcatcacaactgatgcgatgggttgccagaaagatattgcagagaagatacaaaaacagggaggtgattatttattcgcggtaaaaggaaaccaggggcggctaaataaagcctttgaggaaaaatttccgctgaaagaattaaataatccagagcatgacagttacgcaatgagtgaaaagagtcacggcagagaagaaatccgtcttcatattgtttgcgatgtccctgatgaacttattgatttcacgtttgaatggaaagggctgaagaaattatgcgtggcagtctcctttcggtccataatagcagaacaaaagaaagagccagaaatgacggtcagatattatatcagttctgctgatttaaccgcagagaagttcgccacagcaatccgaaaccactggcacgtggagaataagctgcactggcgtctggacgtggtaatgaatgaagacgaccgcaagataagaagaggaaatgcagcagaattattttcagggatacggcacattgctattaatattttgacgaatgataaggtattcaaggcagggttaagacgtaagatgcgaaaagcagccatggacagaaactatctggcgtcagtccttgcggggagcgggctttcgtaatcttgccctggtattcgctgctttgatgatgatgtaaaatgattgtttttgaactggatataacagcttggtagggaagaaagcataaccccacaaaattcatttaccatcgtctacacttactcctgtaaaccgttcaggagcagtaatgaatcagcaacgatttgatgacagcactctaatccgtatcttcgcgcttcatgagttacatcgactgaaagaacatggcttaacgcgcggggcgcttctcgattatcacagccgctataaactcgtatttctggctcattcccagccggaataccgcaaacttggcccgttcgtggctgatattcaccagtggcaaaatctggatgatttttacaaccagtaccgccaacgcgtaattgttttgctttctcatcccgccaacccgcgcgatcacaccaacgttttgatgcacgttcagggttattttcgcccgcatattgagtccacagaacgccagcagctggctgcgcttatcgacagttatcgccgtggcgagcaaccgcttcttgcgccgctgatgcgtatcaaacactatatggcgctttatccttacgcctggctttcagggcagcgttatttcgaactttggccgcgtgtgattaacttgcgccattcaggagttttatgactacccatctggtctggtttcgccaggatttacgtctgcatgataatctcgcgctggctgccgcctgccgcaattcatctgcacgcgtgctggcgttgtatatcgctacaccacgccagtgggcggcgcataatatgtcgccgcgtcaggctgaacttatcaatgctcaactgaacgggctacaaatcgcgctggcggaaaaaggcattcctttattgttccgtgaagtggatgactttgccgccagcgtcgaaatagttaaacaggtgtgcgcggaaaacagcgttactcatcttttttataactatcagtatgaggtgaatgagcgggcgcgggatgtgcaggttgagagaactctgcgtaacgtggtgtgtgaaggatttgatgacagcgtgatccttccgcctggcgcggtgatgaccggcaatcatgagatgtacaaagtctttacgccttttaagaatgcctggctgaaacggctgcgggaagggatgccggagtgcgtcgctgcaccaaaagttcgtagtagcggatcgataaagcccgcgccatccattacgctgaattatcctcgtcagtctttcgatactgcgcatttcccggtggaagaaaaagcggcgattgcgcaattacgccagttttgccagaacggtgccggagaatatgagcaacaacgagattttccggcagtggaaggcaccagtcgtttgtccgccagcctggcaacgggcgggttatcgcctcgccagtgtttgcatcgcttgttggcggaacagccgcaggcgctggacggtggggccggtagtgtctggcttaatgagctgatctggcgcgagttctaccgtcatctgatgacgtattacccctcgttgtgtaaacattgtccgtttattgcctggacggatcgtgtgcagtggcagancaatcccgcacatttacaggcctggcaggaaggcaaaacgggatacccgattgtcgatgctgccatgcgtcagcttaacagcactggctggatgcataacaggctacggatgattacagccagttttctggtgaaagatttgttgatcgactggcgcgaaggcgagcgatatttcatgtcgcagctgattgatggtgatttggcagccaacaacggtggctggcagtgggcggcttctacgggtactgatgcagcgccgtattttcgtattttcaacccgacaacccagggcgagaaatttgaccgcgaaggcgagtttatccgccagtggctaccggaactgcgcaatgtaccggggaaatcggtgcatgagccgtggaagtgggctgagaaagcaggtgtgaagctggattatccgcaaccgatagtcgagcacaaagaggcgagagtacaaacgttggcagcgtatgaggcggcgcggaaggggaaataacagacgcgtcaggcaatcgagcccagatgccggatgcggcgtgaacgccttatccagcctacaaannnnnnnnnnntcaataaattgcaggaaatacgtaggcctgataagacgcgtcaagcgtcgcatcaggcatcggtgctggcctattaagactccagcgccagcgcgcggtttctgaatttcagcgcctgatacagccaaatcatcagtaccactcctacacacgccagtgcgccccaggtaatttgatcaaatacttcaatatatgcattgatggagtagttgatcgccccggaagcatcaaacgaagcctgcgatgtctgatcggcaatcacgcccgccagatagttcgcaatcgcgccggaaagcancatataaatgccggttaatacgccggtcacaccggggatttcaatgcgcgtaatctgcgacatagcaaccgggtcgataaacagttccgcaaagcccatcaccgccaggcctaataccatcngtggcagagaagagtgaccatacattgcggaccagcgggcgcttaaggtcagaatgcagaatccggcgctcatcaggccaaggccaagagcaaattttccccagatgcgcacggtacgattacccgcgacactctcttttaccacccacgccaggaacacaccgcacagcataactgcgaaggcattaatcgactggaacatcgcggtcggaacggtataaccaaacatatcgcgattaacgaagcggtcgatataaaggctaatcgagctaccgccctgttgtgcgaaggcccagaacaacatactgaagaaggtgagcgtcacaatcagcctcagctccttccgctgtttctggttttctgctttgcgataaatttttgccagtacacccaggccaatgatnttcgcgacaatcaaggcgtataccgaccattctttccagaacagtacggtaatcagcgcaggcgttgccaccagcagaaccagcagccatccccagttcggcagcagaaagtttgtcgcacgcagtacttttttgttaacgccgcgggtatgtgtgaaatgacgattgccacataagaaaataaccagacccgcgatcatacccaccgccgccaggccaaagcccatcgcccaactgtactcttcctgggcgtagccacaggcaataggtgcgataatagaccccacgttacccgctgcatacatcagcgagaaaccgccatcacgacgcggatcggttggctcatacagctcgccgagcaggcaactgacattggatttaaacagaccatagccacaaacgattatcgccagggacagatagaggaatgacggatggatctcacttgcacccaacaccatatgaccgatcgccatcaataacgcccccagcatcaccgccatgcgattgccgagaactttatccgccaaaaagccaccgaggattggcgtgacatacaccagcgaacagtaggcgctaaataactcgtaggcgtgagtatcgttgtattttagttgattggtgagatagagaatcagcagggcacgcatgccgtaaaagctaaaatattcccagatttgcagcgcaacgacatagtaaatagcgcgcggttgtgatgcgtgtttattcataataattccacaattgacggcaacgtcacgtaatagttgcgcggcgtgcttgtgtttccttaaagttaaaactttgatacagatctgattatttatgcaatatgctgtctgattgcataaatatacattagctgaagcgtgatgatataaacaatttgcgtcttttggcgtcgggtttgtttcttaatatgtcaaaagattggctatcgacgaacaggcgaggtaacgctatgttaacggtgtagctatcagaatacggaaggcgcgaagatgaaaaacaccgaactggaacaactgattaacgaaaaactgaacagcgcggcgattagtgattacgcgccgaatggtttgcaggtggaaggcaaagagacggtgcaaaaaattgttaccggtgtcactgccagccaggctttgctcgatgaggcagtgcgtctgggcgcggatgcggtcattgtgcatcatggctacttctggaaaggcgaatctccggtcattcgcggcatgaagcgtaaccgtttaaaaacgttgctggcgaatgatatcaacctgtatggctggcatttgccgcttgacgcacatcctgagctgggcaataacgcacagctggcggcgttactggggatcacggtcatgggcgaaattgagccgttggtgccgtggggcgaactgaccatgcctgtgccgggactggagctggcttcctggattgaagcgcgtctgggacgtaagccgttatggtgtggcgataccggacctgaggtggtccagcgcgtcgcctggtgcacgggcggcgggcaaagttttatcgatagcgccgcgcgttttngcgtggatgcttttattactggcgaagtttctgaacagaccattcattcagcccgcgagcagggattgcatttttatgctgcaggtcaccatgccactgaacgtggtggtattcgcgcattgagcgagtggctgaatgaaaataccgatcttgatgtgacctttattgatattcctaatcctgcataacgaataatcagagggatcgaaagtgcaacgagcgcgttgttatctgataggtgaaacggcggtagtgctggaactggaaccgccggtgacgctggctagccagaaacggatctggcgactggcgcagcgtctggtggatatgccgaatgtggttgaagccattcccggcatgaacaatatcacggtgattttgcgtaatcctgagtcgctggcgctggatgccatagagcgtttgcaacgctggtgggaggagagcgaggccctggaacctgagtctcgctttattgaaattccggtggtttacggtggtgcaggcggaccggatttggcggtggtcgcggcgcattgcgggttgagcgaaaaacaggttgttgaattgcactcctccgtggaatacgtggtctggtttttaggttttcaaccgggcttcccgtatctcgggagtttgccggaacaactacacacgccacggcgcgctgaaccgcgcttgctcgttccggcaggttctgtcgggatcggcgggccgcagactggtgtttatccgctggcaacgccgggtggctggcagttgattggtcatacctcactcagcctgtttgatccggcgcgtgacgaacccatcttattacgtccgggagacagcgtgcgctttgtaccgcaaaaggagggagtatgctgaagattattcgtgcgggcatgtataccactgtgcaagatggcggtcgtcacggttttcgccagtcgggtatcanccactgcggcgcactggatatgcctgcgttacgcattgctaacctgctggtgggtaatgatgccaatgcccccgcgctggagatcacgctcggtcagttaacggttgagttcgaaactgatgggtggtttgctctgacgggtgccggttgcgaagcgcggctggatgataatgccgtctggaccggctggcgattgccgatgaaagcaggccagcgtttaacgcttaaacgcccgcagcacgggatgcgcagttatctggcggtcgcgggtggtattgatgttccgccggtaatggggtcatgcagcaccgatctcaaagtggggattggcgggctggaaggccgtttactgaaggatggtgaccgactcccgattggcaaagcgaagcgtgattttatggaagcgcagggcgttaaacagctgctgtggggcaaccgcattcgcgccttgccggggccggaatatcatgagttcgatcgcgcctcgcaggatgcattctggcgttcgccctggcagcttagctcgcaaagtaaccgcatgggctatcgcttacaggggcaaattttaaaacgcaccaccgatcgcgaactgttatctcacggtttgttactgggcgtggtgcaggtgccgcataacgggcagcccattgtgttgatgaacgacgcacagaccaccggtggttacccgcgtattgcctgtatcattgaggctgatatgtaccatctggcgcaaattccgctcggtcagccgattcattttgtccagtgttcactggaagaggcactgaaagcgcggcaagatcagcaacgttatttcgaacaattagcgtggcggctgcacaatgaaaattgacctgaacgccgatctgggcgaaggctgcaccagcgacgcagagctattaacgctggtttcctctgccaatattgcctgtggatttcatgcaggcgatgcgcaaaccatgcaggcttgcgtgcgtgaagcaataaaaaatggtgtcgcgattggcgctcatccgagttttcccgacaggaaaaattttggtcgcagcgctatgcagctgccgccagaaaccgtttacgcccagacgctgtatcaaattggcgcgctggcaacgattacccgtgcgcaaggcggtgtaatgcgtcatgtcaaaccgcacggcatgttatacaaccaggcggcgaaagaggcacaactggcagacgccatcgccagagcggtatacgcttgcgatccagcattggttctcgttgggctggcaggaagcgagctgattcgtgcaggcaagcaatatggcctgacaacgcgcgaggaagtgtttgccgatcgcggttatcaggctgacggctcgctggtgccgcgaagccagtcaggcgcgctgattgaagacgaagaacaggcgcttgcgcaaacgttggagatggtgcaacacggcagagtcaaaagtatcaccggcgaatgggcaacggtcacggcgcaaacggtctgcctgcatggcgacggcgagcacgcactggcgttcgcccgccgactacgctctgcatttgccgaaaaggggattgttgtcgcagcataaccccgattaataaagaatgaaaaaaggatatcaccatgcctgaaggcccggagatccgccgtgcagcggataacctggaggcggcgatcaaaggcaaaccactaactgatgtctggtttgccttcccgcagttaaaaacttatcaatcacaacttatcggtcaacacgttacccatgtggaaacgcgtggtaaggcgttgttaactcatttttccaacgacttaacgctctacagccataatcagctttatggcgtctggcgcgtggttgataccggcgaagagtcgcagaccacgcgagtattgcgggtaaaactgcaaacggctgacaaaaccattctgctntatagcgcctcggatattgagatgttgaccccggaacaactgaccacgcatccgtttttacaacgcgttggtcccgatgtgctggatccgaatctgacgccggaggtggtgaaagaacggttattgtcgccgcgctttcgtaaccgtcagtttgctggattactgctcgatcaggcgtttctggctgggcttggcaattatttgcgtgtggagatcctctggcaggttgggttgactggaaatcataaagcgaaagacctcaatgcggcgcaactggatgcactcgcacacgcgttactggatattcctcggttttcttacgctacgcgggggcaggtggatgagaataagcatcatggggcgctgtttcgctttaaggtttttcatcgtgatggcgaactgtgcgaacgctgtggcggcatcattgagaaaaccacgctgtcatctcgcccgttttactggtgtccgggctgccagcactaggccgtacgtttcggcgcataggttgaaataaaccgcgcaatggcaggccctgtcagcaaaatactgaacaggcgcagggtttgcatcgccataatgagcgccatatcggcattgctccctgcggcgatgaccgccacggtatcaagcccgccggggctggtggcgaggtaggcagtcataaaatcaatgtgcataaaccgggtcagtccccacgccatacccgcacaaatagccagcagagcaaaaatcgacagcaggatttgtggtagcgggcgtagtgcccgcagtaagatttgtttatcgaaaccaaggccaatccgccagccaattgccatatacgccatcgccagtagccattccggtagttcgatggtgatgagctgaccagactggagcactgcgcccgccagcatcgggatgagcatcgtgccggaaggaagacgcagcaggcatcccactgtaccggcaacgaccgcgagcaaaatagtaagcaggagattaatgctcactggcgggaaccagacgatatgctggttaaccgcttcagcgttatcgcccagcatcattcgcgtgaccagaactgcggcccccgcgacaaacagcactcgcagatactgcataaacgccaccaggcggatatctgcgccgtaatcctgcgccatcgcgaccattgccgccgccccgccaggcgaggagccccaggcaccagtatttccgggcagtgagctatagcgcaccagtagccatcccacgatagcgctggaaagcaacgtcaccagtaaaatagctaacacaatcggccagttaacctccagcgtggtcaggatcgaaccggtcaagttttgcgcaatcatgcagccaagaatggcctgcgcggcgagaaaagcggagcgggggagttgcagggtaaccccgcgcatactgaagatgatcccggcgatcatcggtccaagtaagagtgccgccgggagatgtaatccgaggaaaccaatagaaaggagaagtgatagcacacataacattccccactgcaaaactggcatcctttgctccctcattattttctctttggtgtatcgatacagcataaagaatgccgggcatggaaaaaataacggtaatcaataaaagccggaaaattggcaattaaccgaagaagccctctccggctggaaagggcaataggctaaatcagttgtagttaattttgaaaagtaccactgtatcaaagggaccaacgtcgatgggcgtacccggcgtggatgacaattctgccgtgtaggttttttcatacactaacaggtcgctggtaaaatcggcatactcactgtatttgttgaaagtatagggtgaggcattttcatccaacaatcgaagcttcaagccattgccaatgagcagtgatttatcttcgtcgataagggtttcatcggtataaaacgaagagctgactttaaaaccgtcggtacactggtcgttttgtgatttggttgtagttattttaaattgctgcgacatcgtatggcgacgaatatccagcacgttaaatcggccaaaatcaacgacctgggtttcaggtgagatagcaaagttgacgctgcaatccagcacgcggatattttccagaccggtaatgtgatatttcagattcttcgcggtagggtcttcgttcacgctgcctgcgccatcaaactgtacgacgatgtaatcgctgagtttgctctgataatcatggggcggcatggcgcgaactttaacgtaaagccgcatacgcgccacaaacgtccgcgatttgtgcataacggttggatcgccggagcaaagtttattttgccagcccatcgcaatgatctgctccggggtgtaaatatcaatattcttactgtcgatgcactgattcgtgtcgatgcggcttttcccaaggcttgcgtcatagtccacgccttcataggttacgcccaattgataatagggatcctgaataccggggtaagggtttacccaggcgtagacgtgctcgctttcaaaattaccgtttgtgttgttgtcacagtagaccggaatttttatatcgtcagattcccagattttatcgccgggtttggaattggccggaacggcgaagggcataatagcttccgatttttctacagcgccgtttgcggtaccaaaatagcagttcagcgccagcgccgnnnnnnncggcaaaaaaatcagacagatggcgagcaacacgcctttggcgaatctcattttttattctccaccggctgcaggcggcattgccgctggcaggagagcgtgttcatacgcaatgcgccgtagtcgtccatgtagccaagataaaactgcttgccgctatagctgcccgtgctggtggtgaccgaactgaacggtgcgaccatcgtgcttttaaagccaggcagcacgcctttctcatcccgcccaagataggcaatagtcagatagtatccggtcgggtttttcagggtaagctggttattctgctggctaacctgtagctgttgctcaacatgatcgcccatttttttgcgtaatgcggcgggtcgccagaatagcttaatgcgactttggacggcgacttgcaggatcgcatggccctcgctgccttccgggacaggcggaatttcacgcaggttatagtaaaagagagattcgcgatcggtgggtaatttcgcggtggcggcttgtttcatgatccgaacctgcgaagtcgcttttggctccagtcgctggataggcggcagggcgacgagaaattcatcgcttttctctcccttttcattttctatccatgaataggcgaggtaggggagtttatcgctgcggttttccacgcgcaggctggttgctttatctttgctattaaagatgatgcgcgtgcggtcaggctgcactgcgccgtggctgcacatactggcaaccagaagaatcaaagggaatcctttaacaaatgtcatcgtcttttccttaattaatgacagggtaaaatcaggcgcttagtcacatcttccagatgttccggcagatgaatggcacacgttttctggtcgccccagtgcacggtaaattgttgattttcatcgaccccactcagccatgcgtgaccgttttcgccaaccatcccgacgctgacaccgccttcagcctggcgaacatcggcaccgagcggcgggaaatgcccgttagcatcgctgataatgacgttgagatctttcccggcgcgggacgccagcgatttaaagccgatggcgccttcggtccaggtttctttcaccacgttttcggaaacggtaacgccgtcaggcaagtcgttcatattgaccgccaccgtcgtaggctggtagctggaaacaaacggtaccacggcaataccaaagcggttggtgtagtcaatattgccctgaatcggaatatcgcccacgccgtcggtgctgaccatcaggcgtggttcattggtggaactgnggcgatggaatgccgcgccatgttgagtcgcggtaaacgagccgctccaactggcactggcggaagtgtaatcattggcggcataggttccggtcagatcccattcccccgccgaactgaggtgttggtaattgccgctgacctgcgcaccgttatccgggcgatcggattgtattccagccgacattccccaactgtttcgttcatccagggtatcgttccacgacatgcggtgggtggtagtattactgttgttctgcatgtcataacccagtcgaccactttccccaatcggtaaggagatcgaaaagtaaatctggttgtcgcgatctttatcttcataatgggtggtgttgaacgaggtcgagacagaaatatctttccagtcgccaatgtcgacgttaaaaccgacggtaatgttggccgtggtggaggtatccgcattccaccagctctgatgcaggatgttggcgtagagattaagattcagcagagtaataggctgaccgaaggagaggctgattgtttgcttttcatcctgcgcgtcggcgtcattgtatttgtgatcaatgtagttagcgtagctgtgaaaatggcgatcggagaagcgataggctgccaatgagatggtgctgttggtcgcatcaacctgtttgctgtagttaaagcggtagctgtaaccctgctcatcctgttgagtatcaaaatggctgtcggcccaggtcacgtcaaacgacagcgcccccatccagagcatattttgcccaatacccagcgcgccggaacgatagtcatcgcctgcgagaagcatgccgccatatagtgaagtgttggagagcattccccaggagacttcatggctaatgaaggtttcatcctcggtgtggtgcgacatagaggaacgcgggcgaccggcagccagtttatagcgcacctggccctgacgcgtcaggaacggggtagaggccgctgaaacctggaagttattcacccgtccatcttcttcgctcactttgacatccagtgtaccttgcactgactgattcaggtcatcaataataaatgggcctggcggaacttttttctggtaaatcacgcgaccagaatggcttatcgtgaccgtggcgttagtctgtgcgatgccgctgatttgcggcgcgtagccgcgtaactcccaggggagcattcgatcgtcgctggctaacgccgcaccggtataggagaaaccatcaaaaatgttagagctaaaatcggtttcgcccagggttaatcgggaacctatttgcggtaacgggcggaacaggtaggtccgtgaaatcgccccagattgttcacggttgtcgccgctatcggactggctaagctgataatcgctgcgcagacgccatgccccggcgttgaggcccgtggtgccataggcgttcaggttgttgctgctgctgccgctttgtgggcgataagtgctggcaaacaggttgtaatccatcaggaagccaggaataccgttattccacgttgagggtggcgtccagttttctgaatgccacgccagccatgcctgcgggattgtaatattgagctgttgatttgcctgatcgaaagtaaagatgatttcagggaagacactaaaatcgacacattcttttattgccggtaattttttacgaaagtcagatttaagtccgaagagttcgatcagcgattcattgatacaaggaataattttatcgccagatttttgccagcgaatttgttgcccattactgattttattattattaaccgtaacactaacaaagtaatcgccgggagctacgacgcctttttgattgagcaacgaaatatcaacgctatcccgaatcgacttatcgagaacgttaaggttaaattcagctgtcagcgcaggaggggttaccattgccagacaggaaagaacagagagtcgataaatattcacggcatccatacctgaacaatattcgcaaaaggcggctaatcagccgccttaaaaaggattattggtaatccagaacgtaagttgcgttagcagtaacggcccccgcggtaaccgaaactgcgttatccatctgttccatccaggcaaagaagtttaacgtttgttctgttgaacttgccaataagtcaattgttggcgcttctgttcccaatgtaacaaatgattcatctttgttcatgagacgtacgccaacgccggtagcctcgccagcactgatgttactaaggagcggggttgcacctgtcgttttagccgtgctgtcgaaggtcacgcctacctttgagaccacgccacccttgccatcatcccagcctgcaatatcacagttgattaagcgaatattgacaggttttttctcgctatgatgttctcgatttatgtgggatgtggttacttcacccaggtcaatgttcatatcaaggtcatcagggtgaatttcacatggtgcttcaataacttcacctttaaagtggatttcaccagatccttcatctgcagcaaaaacaggtgaagcgaatagtagagatatggccagggcggccagtgttttttgtcctttaaacatacatgaatccttcatgggctatgataaagtatactaattattccgacagaatagtggttttttgttcatgtaataanannnntgttgctacattatgtttgagagtttctcaaagctctcgaatcataaataaagtgaattaatcctattacgagtttatttaattgtgggtgctacccaatgtattctacatcgattggcgggataacggtggtggtgaatgaaaaattaggattttatttagttatcggatatgtattcttgtaacgtgtaattatgtatttgtgtccgattacgtttttttgtcnatagacataactaacgaacaaaaaaaagccnnnnngatattcaggcgggctaaacgatatatggttcaaatcagataattaatgtttaacatctgatttaaagtctcgtttttcatagccggtgtacaactggcgcggacgggcgatcttcatgccgtcactgtgcatttcgctccagtgagcgatccagccaacggtacgggccatagcgaagatgacggtgaacatggaagacggaatacccatcgctttcaggatgataccagagtagaaatcgacgttcgggtacagtttcttctcgataaagtacgggtcgttcagcgcgatgttttccagctccatagccacttccagcaggtcatctttggtgcccagctctttcagaacttcatggcaggtttcacgcattacggtggcgcgcgggtcgtaatttttgtacacgcggtgaccgaagcccatcaggcggaaagaatcatttttatctttcgcacgacgaacaaattccggaatgtgtttaacggagctaatttcttccagcattttcagcgccgcttcgttagcaccaccgtgtgcaggcccccacagtgaagcaatacctgctgcgatacaggcaaacgggttcgcacccgaagagccagcggtacgcacggtggaggtagaggcgttctgttcatggtcagcgtgcaggatcagaatacggtccatagcacgttccagaatcggattaacttcatacggttcgcacggcgtggagaacatcatattcaggaagttaccggcataggagagatcgttgcgcggataaacaaatggctgaccaatggaatacttgtaacacatcgctgccatggtcggcattttcgacagcaggcggaacgcggcaatttcacgatgacgaggattgttaacatccagcgagtcgtgatagaacgccgccagcgcgccggtaataccacacatgactgccattggatgtgagtcgcgacggaaagcgtggaacagacgggtaatctgctcgtggatcatggtatgacgggtcaccgtagttttaaattcgtcatactgttcctgagtcggtttttcaccattcagcaggatgtaacaaacttccaggtagttagaatcggtcgccagctgatcgatcgggaaaccgcggtgcagcaaaataccttcatcaccatcaataaaagtaattttagattcgcaggatgcggttgaagtgaagccagggtcaaaggtgaacacaccttttgaaccgagagtacggatatcaataacatctngacccagcgtgcctttcagcacatccagttcaacagctgtgtccccgttgagggtgagttttgcttttgtatcagccatttaaggtctccttagcgccttattgcgtaagactgccggaacttaaatttgccttcgcacatcaacctggctttacccgtttgttatttggctcgccgctctgtgaaagaggggaaaacctgggtacagagctctgggcgcttgcaggtaaaggatccattgatgacgaataaatggcgaatcaagtacttagcaatccgaattattaaacttgtctaccactaataactgtcccgaatgaattggtcaatacttccacactgttacataagttaatcttaggtgaaataccgacttcataacttttacgcattatatgcttttcctggtaatgtttgtaacaactttgttgaatgattgtcaaattagatgattaaaaattaaataaatgttgttatcgtgacctggatcactgttcaggataaaacccgacaaactatatgtaggttaattgtaatgattttgtgaacggcctatactgccgccaggtctccggaacaccctgcaatcccgagccacccagcgttgtaacgtgtcgttttcgcatctggaagcagtgttttgcatgacgcgcagttatagaaaggacgctgtctgacccgcaagcagaccggaggaaggaaatcccgacgtctccaggtaacagaaagttaacctctgtgcccgtagtccccagggaataataagaacagcatgtgggcgttattcatgataagaaatgtgaaaaaacaaagacctgttaatctggacctacagaccatccggttccccatcacggcgatagcgtccattctccatcgcgtttccggtgtgatcacctttgttgcagtgggtatcctgctgtggcttctgggtaccagcctctcttcccctgaaggtttcgagcaagcttccgcgattatgggcagcttcttcgtcaaatttatcatgtggggcatccttaccgctctggcgtatcacgtcgtcgtaggtattcgccacatgatgatggattttggctatctggaagaaacattcgaagcgggtaaacgctccgccaaaatctcctttgttattactgtcgtgctttcacttctcgcaggagtcctcgtatggtaagcaacgcctccgcattaggacgcaatggcgtacatgatttcatcctcgttcgcgctaccgctatcgtcctgacgctctacatcatttatatggtcggttttttcgccaccagtggcgagctgacatatgaagtctggatcggtttctgcgcctctgcgttcaccaaagtgttcaccctgctggcgctgttttctatcttgatccatgcctggatcggcatgtggcaggtgttgaccgactacgttaaaccgctggctttgcgcctgatgctgcaactggtgattgtcgttgcactggtggtttacgtgatttatggattcgttgtggtgtggggtgtgtgatgaaattgccagtcagagaatttgatgcagttgtgattggtgccggcggcgcaggtatgcgcgcggcgctgcaaatttcccagagcggccagacctgtgcgctgctctctaaagtcttcccgacccgttcccataccgtttctgcgcaaggcggcattaccgttgcgctgggtaatacccatgaagataactgggaatggcatatgtacgacaccgtgaaagggtcggactatatcggtgaccaggacgcgattgaatatatgtgtaaaaccgggccggaagcgattctggaactcgaacacatgggcctgccgttctcgcgtctcgatgatggtcgtatctatcaacgtccgtttggcggtcagtcgaaaaacttcggcggcgagcaggcggcacgcactgcggcagcggctgaccgtaccggtcacgcactgttgcacacgctttatcagcagaacctgaaaaaccacaccaccattttctccgagtggtatgcgctggatctggtgaaaaaccaggatggcgcggtggtgggttgtaccgcactgtgcatcgaaaccggtgaagtggtttattttaaagcccgcgctaccgtgctggcgactggcggagcagggcgtatttatcagtctaccactaacgcccacattaacaccggcgacggcgtcggcatggctatccgcgcaggcgtaccggtgcaggatatggaaatgtggcaattccacccgaccggcattgccggtgcgggcgtactggtcannnnnngttgccgtggtgaaggcggttatctgctgaacaaacatggcgaacgctttatggagcgttatgcgccgaacgccaaagacctggcgggccgtgatgtggtggcgcgttcaatcatgattgaaatccgtgaaggtcgcggctgtgatggtccgtgggggccacacgcgaaactgaaactcgatcacctgggtaaagaagttctcgaatcccgtctgccgggtatcctggagctttcccgtaccttcgctcacgttgatccggtgaaagagccgattccggttatcccaacctgtcactacatgatgggcggtattccgaccaaagttaccggtcaggcgctgactgtgaatgagaaaggcgaagatgtggttgttccggggctgttcgcggtaggtgaaattgcctgcgtatcggtacacggtgctaaccgtctgggcggcaactcgctgctggacctggtggtctttggtcgcgcagcgggtctgcatctgcaagagtctatcgccgagcagggcgcattgcgcgatgccagcgagtctgatgttgaagcatctttggatcgcctgaaccgctggaacaataatcgtaacggtgaagatccggtggcgattcgtaaagcgctgcaagaatgtatgcagcataacttctcggtcttccgtgaaggtgatgcgatggcgaaagggcttgagcagttgaaagtgatccgcgagcgtctgaaaaatgcccgtctggatgacacttccagcgagttcaacacccagcgcgttgagtgcctggaactggataacctgatggaaacggcgtatgcaacggctgtttctgccaacttccgtaccgaaagccgtggcgcacatagccgcttcgacttcccggatcgtgatgatgaaaactggctgtgccactccctgtatctgccagagtcggaatccatgacgcgccgaagcgtcaacatggaaccgaaactgcgcccggcattcccgccgaagattcgtacttactaatgcggagacaggaaaatgagactcgagttttcaatttatcgctataacccggatgttgatgatgctccgcgtatgcaggattacaccctggaagcggaagaaggtcgcgacatgatgctgctggatgcgcttatccagctgaaagagaaagatcccagcctgtcgttccgccgctcctgccgtgaaggtgtgtgcggttccgacggtctgaacatgaacggcaagaatggtctggcctgtattaccccgatttcggcactcaaccagccgggcaagaagattgtgattcgcccgctgccaggtttaccggtgatccgcgatttggtggtagacatgggacaattctatgcgcaatatgagaaaattaagccttacctgttgaataatggacaaaatccgccagctcgcgagcatttacagatgccagagcagcgcgaaaaactcgacgggctgtatgaatgtattctctgcgcatgttgttcaacctcttgtccgtctttctggtggaatcccgataagtttatcggcccggcaggcttgttagcggcatatcgtttcctgatcgatagccgtgataccgagactgacagccgcctcgacggtttgagcgatgcattcagtgtattccgctgtcatagcatcatgaactgcgtcagtgtatgtccgaaggggctgaacccgacgcgcgccatcggccatatcaagtcgatgttgttgcaacgtaatgcgtaaaccgtaggcctgataagacgcgcaagcgtcgcatcaggcaaccagtgccggatgcggcgtgaacgccttatccggcctacaagtcattacccgtaggcctgataagcgcagcgcatcaggcgtaacaaagaaatgcaggaaatctttaaaaactgcccctgacactaagacagtttttaaaggttccttcgcgagccactacgtagacaagagctcgcaagtgaaccccggcacgcacatcactgtgcgtggtagtatccacggcgaagtaagcanaaaaaagatgcttaagggatcacgatgcagaacagcgctttgaaagcctggttggactcttcttacctctctggcgcaaaccagagctggatagaacagctctatgaagacttcttaaccgatcctgactcggttgacgctaactggcgttcgacgttccagcagttacctggtacgggagtcaaaccggatcaattccactctcaaacgcgtgaatatttccgccgcctggcgaaagacgcttcacgttactcttcaacgatctccgaccctgacaccaatgtgaagcaggtaaaagtcctgcagntcattaacgcataccgnttccgtggtcaccagcatgcgaatctcgatccgctgggactgtggcagcaagataaagtggccgatctggatccgtctttccacgatctgaccgaagcagacttccaggagaccttcaacgtcggttcatttgccagcggcaaagaaaccatgaaactcggcgagctgctggaagccctcaagcaaacctactgcggcccgattggtgccgagtatatgcacattaccagcaccgaagaaaaacgctggatccaacagcgtatcgagtctggtcgcgcgnntttcaatagcgaagagaaaaaacgcttcctaagcgaactgaccgccgctgaaggccttgaacgttacctcggtgcaaaattccctggcgcaaaacgcttctcgctggaaggcggtgacgcgttaatcccgatgcttaaagagatgattcgccacgctggcaacagcggcacccgcgaagtggttctcgggatggcgcaccgtggtcgtctgaacgtgctggtgaacgtgctgggtaaaaaaccgcaagacttgttcgacgagtttgccggtaaacataaagaacacctcggcacgggtgacgtgaaataccacatgggcttctcgtctgacttccagaccgatggcggcctggtacatctggcgctggcgtttaacccgtctcaccttgagattgtcagcccggtcgttatcggttctgttcgtgcccgtctggacagacttgatgagccgagcagcaacaaagtgctgccaatcaccattcacggtgacgccgcagtgaccgggcagggcgtggttcaggaaactctgaacatgtcgaaagcgcgtggttatgaagttggcggtacggtacgtatcgttatcaacaaccaggttggcttcaccacctctaacccgctggatgcccgttcaacgccgtactgtactgatatcggtaagatggttcaggcaccgatttttcacgttaacgcggatgatccggaagccgttgcctttgtgacccgtctggcgctcgatttccgtaacacctttaaacgtgatgtcttcatcgacctggtgtgctaccgccgtcacggccacaacgaagccgacgagccgagcgcaacccagccgctgatgtatcagaaaatcaaaaaacatccgacgccgcgcaaaatctatgctgacaagctggagcaggaaaaagtggcgacgctggaagatgccaccgagatggttaacctgtaccgcgatgcgctggatgctggcgattgcgtagtggcagagtggcgtccgatgaacatgcactctttcacctggtcgccgtacctcaaccacgaatgggacgaagagtacccgaataaagttgagatgaagcgcctgcaggagctggcgaaacgcatcagcacggtgccggaagcggttgaaatgcagtctcgcgttgccaaaattnnnnnnnnnnnccaggcgatggctgccggtgagaaactgttcgactggggcggcgcggaaaacctcgcttacgccacgctggttgacgaaggcattccggttcgcctgtcgggtgaagactccggtcgcggtaccttcttccaccgccacgcggtgatccacaaccagtctaacggttccacttacacgccgctgcaacacatccataacggccagggcgcgttccgtgtctgggactccgtactttctgaagaagcagtgctggcgtttgaatacggttatgccaccgcagaaccacgcactctgactatctgggaagctcagttcggtgacttcgccaacggtgcgcaggtggttatcgaccagttcatctcctctggcgaacagaaatggggccggatgtgtggtctggtgatgttgctgccgcacggttacgaagggcaggggccggagcactcctccgcgcgtctggaacgttatctgcaactttgtgctgagcaaaacatgcaggtgtgcgtaccgtctaccccggcacaggtttaccacatgctgcgtcgtcaggcgctgcgcgggatgcgtcgtccgctggtcgtgatgtcgccgaaatccctgctgcgtcatccgctggcggtttccagcctcgaagaactggcgaacggcaccttcctgccagccatcggtgaaatcgacgagcttgatccgaagggcgtgaagcgcgtagtgatgtgttctggtaaggtttattacgacctgctggaacagcgtcgtaagaacaatcaacacgatgtcgccattgtgcgtatcgagcaactctacccgttcccgcataaagcgatgcaggaagtgttgcagcagtttgctcacgtcaaggattttgtctggtgccaggaagagccgctcaaccagggcgcatggtactgcagccagcatcatttccgtgaagtgattccgtttggggcttctctgcgttatgcaggccgcccggcctccgcntctccggcggtagggtatatgtccgttcaccagaaacagcaacaagatctggttaatgacgcgctgaacgtcgaataaataaaggatacacaatgagtagcgtagatattctggtccctgacctgcctgaatccgtagccgatgccaccgtcgcaacctggcataaaaaacccggtgacgcagtcgtacgtgatgaagtgctggtagaaatcgaaactgacaaagtggtactggaagtaccggcatcagcagacggcattctggatgcggttctggaagatgaaggtacaacggtaacgtctcgtcagatccttggtcgcctgcgtgaaggcaacagcgccggtaaagaaaccagcgccaaatctgaagagaaagcgtccactccggcgcaacgccagcaggcgtctctggaagagcaaaacaacgatgcgttaagcccggcgatccgtcgcctgctggctgaacataacctcgacgccagcgccattaaaggcaccggtgtgggtggtcgtctgacccgtgaagatgtggaaaaacatctggcgaaagctccggcgaaagagtctgcaccggcagcggctgctccggcggcgcaaccggctctggctgcacgtagcgaaaaacgtgtcccgatgactcgcctgcgtaagcgtgtggcagagcgtctgctggaagcgaaaaactccaccgccatgctgaccacgttcaacgaagtcaacatgaagccgattatggatctgcgtaagcagtacggtgaagcgtttgaaaaacgccacggcatccgtctgggctttatgtccttctacgtgaaagcggtggttgaagccctgaaacgttacccggaagtgaatgcttctatcgacggcgatgacgtggtttaccacaactatttcgacgtcagcatggcggtttctacnncnnncggcctggtgacgccggtactgcgtgatgtcgataccctcggcatggcagacatcgagaagaaaatcaaagagctggcagttaaaggccgtgacggcaagctgacggttgaagatctgaccggtggtaacttcaccatcaccaacggtggtgtgttcggttccctgatgtctacgccgatcatcaacccgccgcagagcgcaattctgggtatgcacgctatcaaagatcgtccgatggctgtgaatggtcaggttgagatcctgccgatgatgtacctggcgctgtcctacgatcaccgtctgatcgatggtcgcgaatccgtgggcttcctggtaacgatcaaagagttgctggaagatccgacgcgtctgctgctggacgtgtagtagtttaagtttcacctgcactgtagaccgacgtggatagggtgtcggtctacggtttaaaagataacgattactgaaggatggacagaacacatgaacttacatgaatatcaggcaaaacaactgtttgcccgctatggcttaccagcaccggtgggttatgcctgtactactccgcgcgaagcagaagaagccgcttcaaaaatcggtgccggtccgtgggtagtgaaatgtcaggttcacgctggtggccgcggtaaagcgggcggtgtgaaagttgtaaacagcaaagaagacatccgtgcttttgcagaaaactggctgggcaagcgtctggtaacgtatcaaacagatgccaatggccaaccggttaaccagattctggttgaagcagcgaccgatatcgctaaagagctgtatctcggtgccgttgtagaccgtagttcacgtcgcgtggtctttatggcctccaccgaaggcggcgtggaaatcgaaaaagtggcggaagaaactccgcacctgatccacaaagttgcgcttgatccgctgactggcccgatgccgtatcagggacgcgagctggcgttcaaactgggtctggaaggtaaactggttcagcagttcaccaaaatcttcatgggcctggcgaccattttcctggagcgcgacctggcgctgatcgaaatcaacccgctggtcatcaccaaacagggcgatctgatttgcctcgacggcaaactgggcgctgatggcaacgccctgttccgccagcctgatctgcgcgaaatgcgtgaccagtcgcaggaagattcgcgtgaagcacaggctgcacagtgggaactgaactacgttgcgctggacggtaacatcggttgtatggttaacggcgcaggcctggcgatgggtacgatggacatcgttaaactgcacggcggcgaaccggctaacttcctggacgttggcggcggcgcaaccaaagaacgtgtaaccgaagcgttcaaaatcatcctctctgacgacaaagtgaaagccgttctggttaacatcttcggcggtatcgttcgttgcgacctgatcgctgacggtatcatcggtgcggtagcggaagtgggtgttaacgtaccggtcgtggtacgtctggaaggtaacaacgccgaactcggcgcgaagaaactggctgacagcggcctgaatattattgcagcaaaaggtctgacggatgcagctcagcaggttgttgccgcagtggaggggaaataatgtccattttaattgataaaaacaccaaggttatctgccagggctttaccggtagccaggggactttccactcagaacaggccattgcatacggcactaaaatggttggcggcgtaaccccaggtaaaggcggtactacccacctcggcctgccggtgttcaacaccgtgcgtgaagctgttgctgctactggcgctaccgcttctgttatctacgtaccagcactgttctgcaaagactccattctggaagccatcgacgcaggcatcaaactgattatcaccatcactgaaggcatcccgacgctggatatgctgaccgtgaaagtgaagctggatgaagcaggcgttcgtatgatcggcccgaactgcccaggcgttatcactccgggtgaatgcaaaatcggtattcagcctggtcacattcacaaaccgggtaaagtgggtatcgtttcccgttccggtacactgacctatgaagcggttaaacagaccacggattacggtttcggtcagtcgacctgtgtcggtatcggcggtgacccgatccctggctctaactttatcgacattctcgaaatgttcgaaaaagatccgcagaccgaagcgatcgtgatgatcggtgagatcggcggtagcgctgaagaagaagcagctgcgtacatcaaagagcacgttaccaagccagttgtgggttacatcgctggtgtgactgcgccgaaaggcaaacgtatgggccacgcgggtgccatcattgccggtgggaaagggactgcggatgagaaattcgctgctctggaagccgcaggcgtgaaaaccgttcgcagcctggcggatatcggtgaagcactgaaaactgttctgaaataaatatctgtaataagaaatagccctcgccgcttccctctacaggaatggcgaagggctgtcggtttcgacatggttggccatcgtatgatggccttttttatgccttaaacggttaaccacggtcgaaatctgactgcaggcttgactgcatgaccacagccactgtggattgccgcaaccgaccgcaagccacgaataagaacgacggcgaatttcgaatcgttacctgatgcactggcttcccagcgtttgaccgtagcgttaagtaaatcaacaaaagcgatgttcaccgcttttcgtcaagtcgtgccatttgtcagccaggatcgggtctttaccccggatattgcagcatcgcaaaaattcttagagggatatgctataaatcaaaaataaaatctttgttgattgtttatcataatatccacagatatgataaatgatatcaatttaataattttcacttaatgtgattccggataattcgaaaggcgctgtgcttttcggattattattatctgattaagatatttgtcacgccagccttactggtttataaatgtcaatcatgattcttataaattatttattgctgctttggttaccattacttcgtaataagtaatgtatttttgatggtttaaactatttttaagggacggcattatgcgagggaaaatacctaaaacggaactgctggtgacttttgaggtcgtcgcacgtcatgaaagttataccagagcggcagaggagttagcgttaacccaaagtgcagtattcagacaagtaagtgcgctggaggaatttttacgtactccgttattttcacactctaaaaaacgcatttttcttaatgatacagggaagtattacctggggatagtaaaagaaacattaaataagctggaacgcgataccaataccattatgacctggcagcctacggttcaggttattgaacttgccgttaatcctacttttagtacccactggttaatcccaaatttacatgaattcacaaagttacatcccgatattattgttaatattcattctttagctaataacggcgattttcttaatcgggagtacgatgctgtcattatgcgcgaaannnttnncgcgccctgggcggaagtagaatatctctttgaagaggagattttgccggtatgcagcggcagtttgcttgcaatgtccgatcaaaaactgtcagtggcagaactgcttactgagttaccacttctgcatcaaagcacccgtattactggctgggaagagtggtttgctttatctggcgttagcagtccgctggtcaacaacggaccacgtttcgatttgctttcaatgctgattgccgccgtgcgctctaatctcggcgtggcgctgttaccacgtttcgctattcaacatgatttggatagtggcgatatggtgattccctgtgatgtgcctattcgtaccggtaatcgttttattatgacgtggcaggaagagaagtctgactcaccgcacttgcagcaatttcgtgaatggttgctggcgaaatcggtcgtaccgcaggagatgtaaaacctgcgcctggcgggatgccaggcgcagttattaccagtcgatacccggctgggcctgaatgccgttatcaaaagcatgtttgacggggcggatttcgctgaccgtatctgccatttttaatatctgactgtggcaaccgcgtccggtgacaatgacactttgttgtgccgggcggttttgcagagaagcgatcacttcttcggtatccagataatggtaagccagcatataggtcagctcatcaagcaccactaagtcgtaacgcttgtcagccagcatccgtttgctttccgaccagacntctttcgccgcgtcgatatccgcttgccggttctgtgtctcccaggtaaaaccggttcccataatatgaaactcaacccccagcggctggagaaggttgtattcgccgttgtcccattgccccttgatgtactgcgcaacccccaccgttttgccatgacccaccgcgcgcgtcacagtaccaaacgcggcagtggatttccctttgccgttgccggtgaaaacaatcaagatcccttttttctctatcgccgccncgacgcgcgtatcgacctgttccttcaatttctgttggcgctgcacatgccgttcagttgaaattcgcgcttccattcattttccttaatgtcccgcagggcaactggcgcagcggtgttgctgctcaaactgactaaagaaattattgcctttatcatctaccaggatgaatgcgggcagattttccacttccatcatccacaccgcttccatacccagctccgggtattccaggcaacgcagacttttgacatattcttgcgccagtaacgcagctgcaccgccaatacttcccagattgaagccgccatgtttgtgacaggcatcggtgacctgctggctgcggttacctttcgataacatcactagactgccgccagccgcctggaaggtatcgatataaccgtccattcgaccgcccgtggttggacccagtgaaccgcaggccatgttctccggtgttttcgccgggccagcgtaatagacaatatgatgcttcaggtactccggcatcggttcgccgctatccagccgcgcnntnnnnnnnnnnnnnnnnatatcgcgcgccactacgatgggaccacttaacgacacgcgggtgcctactggtaatctggcgagatcctgcatcacgtcacgcaacggacggtttagatccagttgtacatgttgcgcgtgattttcttcccgcagtgaggctggaatatattgccccggattgtgttcgagtttttccagccagataccgtgtttgttaatttttgctttgatattgcgatcggcagaacaggagagcgccatagctatcgggcaagagccaccgtgacgcggcagacgaatgacgcgaatatcatgagcgaaatatttacccccaaattgcgcaccaataccaaattgctgactggcctcgagcaacactttttccagctcaatatcacggaatgcttgtccctgctcgtttccgctggtgggcaaattgtcgtaatatttcgttgaggccagcttggcaatttttanggtttgatcggctgaaagccctccgacgacaaaggcgatgtggtaaggcgggcaggcagcggtgcccagcgatttcattttttcgattaaaaatgcggtcagtttttctggttgcaataaggatttggtttcctgataaagcgcggctnnnntggnggagccgccccctttattaacacagagaaaatggtactcatcaccagcgacagcgctgatatcaatctgcgccgggagattggtttgcgtattgacttcggtatacatatccagcggcgcattttgtgaaaagcgcagattattttcctggaaagtactgtaaatgcctttacttaaggcttcggcgtcgttacctccggtccatatctgttgccctttactggcaacaatagttgcggtgccggtatcctgacagttgggtaataccccttttgctgagacttcagcattacgtaataactgcaacgcaacgtatttatcattactgctggcctgctgatcgttaagaatgctggcgacctgttgcaaatgagcggaacgtaagaaaaaagaggcttcataaaatgcctgccgggcaagcagcgttaatgcttcaggagcgatttttatcacttcttcgccgtctaattccgttactgtaatatgttgatcgctaattaatgtatattctgtaccgtctttattttgtagaaacggttcttgccagataaatggtttggacatatttcacttttcaccttaaacgttagtgttacttaattgccgtctaacttcatgatccggcttataaaaatgcgtagtcattggcttctgattgcttaagatccccctcagggcagagcaacgttcgattcattgggttttaatgctttaccccgacagccctcgccgaaatgttcgccttcccaccgactcaccatcgcagcgcccatcagcaagatcagccccgcttccgaaatattgaactggttgagcgtggcggcgataaccaccattgaggcgcgtggtacgccagccattcctttcgaggtcaacatcaggatcaacagcatggtgatttgctcaccgatggataaatggatattgcaggcctgggcgatgaaaactgtggcgaaggagcagtaggccattgatccaacgagattaaatgagtagccaatgggtaagacaaagctggcaattttgggggaaacgccaaattgctccagtttttcaagcgttcccggaaaagccgcttcagaactggatgtggtaaatgccagcagggcgggttccgaaagggcgcgggtcaggcgtctgatgcaggggccgacataaacgatggccagaccgataagcagtacccaaagtaataacatggtgaaataaaattcacccataaagatcccggcgctcaccataactgccagtcctcgttcagcaatcaatgctgaaatagcagcgaatacggtcaggggagcgaagagcatgacgtagccagtgagctttaacatggcatgtgccagcgaatctaaggcgtgaacgatagcgctgcctttctcgccaatcgccgtcaggctacagccgaggaaaattgagaacaccacgatttgcaaaatttcattgtgcgccatggcatcgacaatgctggtggggaaagcatgcgaaataaatacttttagcgtaaagggttctgccgcgaccactccggtggtttcggcaccgtgtgcaacaaaattaattcctgtacctggcatgaagaaatttaccgttatcaagcctaaggcaattgacagcaatgaggcgcaaataaataaaaagagtgttttagaaaaaatacgaccaagggctttggcatcgcccattttagcaatacctaccaccagggtagagaccactaacggagcgataatcatttttatcagtcgtaagaaaatcgtcgtgaatatcgatatttcttgcgcatagagttttgcggtttccggtgaagcagtgttattgagcactacgccgataatcattccaagtaccagcgccaaaagaatcatcgtggttaaacttattttcttcattttttcctccatcaggtgcacggcgataaatcagaatcaggagaagtagatgcctgaatagagattcaggcatctacctgctattacaaccttacaaatagctgaagtgttgaactgcaataagtgacgggatgtcagttggctaaaagtattcggatttttacaaatcgaaactcatatttaataaaggtgcatgttgctgtgcaccatagacatcattgtcacctacattcccggagataatatctcgtggcatgacgatttttactgcgttagaaggatcaaaccagacaatacgatgaataaagtcaggttcaacatgatataagcgtgcaatcagttctggggttaattgccctgatgatttaactcgctcatagttttctttcgttttaaataaaatatctaaaaccagttcgtaaggtccggcatttttcgaacgaatgacttgcgccagtgagacaattgactgtttcatgcctgaactccttctggcgtcacctgttcaatatggaaatcaaaacgcagagcgtcgttggcttcaatcaggtgatatatggaaaattcgtataccggcccgccctggatatcagaaggggagaacgggaacgccagattacctgcggtagcgatgcggttttcatagccgtagtgcagcatggtagagcgcaccagcgagcaaacgctgttggcaatttcctgggtcggtgcaactacatcaaggacaatccccagctcatgcccggcagtttgcatcggttcatggtctcccatcaccccgtttttgccgtacaggtggaaattgatgcgaatgctgtcatcgtcgagcgacaggttacgcgaaacgctggttttgacttcatcgatgattttatcgatcccggcgatcataatcgggtcgcgcgttccggcgatggtcagacagcggaagcccacccgtcgtgcaccttccagtttcagggcatacggcgtttcttcatgcttagaaccgctgacgtagacttcgccgtcatttactgctttaaatgtgcagcctttcaggttcaacacgccgccaggtcctggcaggaagtagggatcggatttctcatacagtgtgtgtgcagctgctgacgtttcggtnnnnttacgcttcggattaaatgttttcagcgtaaagccgttgtcatcaatgatgcccatcgcacagtcagagcctgagccgggcgttgcggcgattgccgcgcattcaaggattttcccacaatgcagcgccagaccttcatcaaagccttgcatgatcgggagcgcagcaaagcaggccgggtcgtaagcgcgcccgcccagcaccacttgcgcgcgttctttcagcgcccgctggaagggttcgatgcccatttgcgcgacgatatacgtactttcgtcaatcgcgtcgtgggttaacggcgggacaaaatccagcgccgtgattttgccgttatccagcgcctggtggacgatggctttgtcaacgtctgccgggatcaacgccatcgagaacgagaggtgctcttcccgggcaatctcatgaattatttctcggcaccactccaggtgtggtgcggcaccagaaccgccagccgttccgatcaccaccggtatattattttgcacgcctgcggtgatcatatagcgcagatcgcgcttgacccctgcgcgatcggtaaacggtttgcctgccccgaggtagtgggggcctggatcggaagagcctgcatcaacggcgatcagatcgggcgattctgccatcgctttgcggaagctctcttccgggaatccatacccgaggattgccgttggcgataagactttaaaagaacgagccatttgttaatccttagcctgcaacagcgcgatagtacgattcatttcgttgaagacgatatcgaggccttcgtcaaagcccatccctggttttaccagcatacgcatggggcgagcggcaagggcgacgtggacacaggtgcgggcactgacatcagtttcattgcaggtgccgccctggtacgcttccatgctgtggctgttgcagtaaagaaccgcatcgacgatgttgtgaatactgcccagatccggggttttgatttgcaccatgtgacaactggcagcatcagtgaaatcaacaatatcctggtaggtgttacaccattcatcggccacaattttcacgccggaaccgaggcgcgtcagctctttggtaatcgcggtcagcaggcgaatttgatcgggcttgttaccggcatcgaccggcccttcgatgtagagcggcaggccttgcgcttctttttccaggctggcgatgtattgcgcacagcgaagcggatccatatcgaagatcagaccgatagtgccgtatacatcgatgtgcagggtagggtggtagcgtgcgctggtgcgcttgcttagaatgcgatccgacaaccagcggacatattcgcgcagtttttcacctttaaagcccagcttctcttcgacgttattaatcagcgcatggggcagcacgtcgatgcctttaaggatcatcttatcgacggcgatatatcgatcgtcgccgctctgaccaaataatggaatggattccgccacgcgtggcaactgccattcatcacagaccacttcagttttcagacggccggttgccagcgcggtagcatcaagcagcgcctgtgataatccgtagcgcacggcggtatgcagcaagttgccgtcaatacgcaatttgtcgaagaaacgggcattcggcaggaaagcatccacatcgcggcctaccagtaatggcttgatatggtcgttgaggaacggaataaagtgctctgcgaggaacagtggatcgcgaccgcctgccccggaatactgtacggcagtacagtcacctacggcgaccgcgccgttttccagaatcaactgtaccgatacgcactccccggcctgacgtacggcgttaaacccctgtgttactggctccccggtataaaaaaagccgtcatgacccgctccgttttttatcgcctgctggtcatcgaaatagaatgaggagtagccagcggtgaacagagcctgttttattttcattatggtcttcctattaatttactgtgggatacagcattgatgtcatctacaaccatctggaatgtcggttggcgtccttcacagcgtgcgcgttccgcaacgtaatcgtggtggaggtcgagaatatcttttggcaatggaacggctccggcttccagtacgcgtatcgcgccggtgttgtcacggaccggaagaattttgcccgcgttgcaggcggctggcgcaaacggcacatccagtacgcccgcttcaaatgccagcaccgttccgcgcgcaatatcaccattacccagttcgaacactttattcagtaccgcgcgaacctcgctcttaatcagttcaatttccagttcaaccgcagggcacggcgggaatttctgctcattgaccatgttgagcatttggcgggaggctttcagcccctgaatgttggcagcggcagtcgggataccccaggcttcgtgcggacttttggtgatgactttggtggcaccagacatccccgcgacggctgcgccccaggagataatagcgaacgctttcgattcgtcttccggaaagccgcccatccactggtgaaacacggtactcaattcatagtcggtatagccatagctctgaaaatattcgtgtgcaagttcacgcagagactggatcgccgcaacatcctgcgtcaggctgccgacctggccataaccaacggtgatagatttcacaccctgttccagcgccagcaagccttcgattatcgcgatagagtgcgagataaacggcgggatcagcgtacccgttagtgggccaaacggttcgcggttgatgcggatcccgtgttcttcatacatccccattaaacggtcgcagtactgccagtcgcggatcgatttttccagcgttacgcgtttggcatacggaatgttgtaggaaatgccaccgccttcataactggtaaagccgctggccattgagatttcagccagcagacgcgcatctggcgtgccgtggcggatctgtagcggtttttgcagggtttcggtgaggcgacggcaagctgcgacaccatggttaactaccggtaaaccgttcagtttagaggttccggcttcgatggattttttaatccctacagccgcttcttcgtaccgattcagacgggtatatgcatcgatggtgcttggcagcagatcgcactcttcttgtagtgttttcagcagttcgatgtgttcgtccatcagcgccacacctgcgcgcggttggctaagggttttaccttccttgtctgctttcagcagcgcaagagagaaacgtttatgctcagggatggtttgttggtatttaacgccatcttcaaagttttcaacatccttgccggtttcccaggttttcagtacctgttgccgctcggtcatgaattcgtcatgggttaatttcttatttcgaagttccattgattgcagccttaattgttatagggttaagcattgaatactggtgcgcgcggcggccagcggatcgactctggcgacgtttgccagcagtggtaatagcccccgggaatcgcggtaatattcaaattcggtcggtaagagaatgcgtttaccgtcgtcgtttaactcgcggtatttcaaccagtgatgcatatcgaactgactggcacgcgagagccatccgccggatccgacgactttacgcacggttgtcaggtcacgtcccatctgtaaatcgacattgccgacgcaggtgcagacctcttttttggtgcccgcatgtctttcggtggcataacccacacacagtccggccaggacggtatcgaaannnntctcttctgcatttgcgggtaagtagtcgggatgagcgactagatgacggaggtaatgataaaaagcgtccagctgtgcgggttgctgagcaaaattcacattgactaactctttcgcactttcaccaaccaccactgccgagacgcgcattcccagatcgccttccaccgtccgttttacgaagggttccggtacgccgtgtaaaacggtgtcgggcgagagcgtgttggcacaggcggaataaacatcggtggttgcgccgcccatgtcgatcagcatgaactctttccagctgtgatcgacgttactgattgccttgaccagttcaaagaccgtccatggtgtcggcattggttcttcgcctgttttatcaacaatgacatccagccctttcccnttaacgatgcgtttaaggaatatgtcgcaaatagcctggcgtgcagctacagggttcggatggtcaagatcgggcagaacgttgtcgacaatggtcaggtctttatgcccgaggatctcctgcacctcgtcctgaatatcccggtttccggcataaataatggcgcagtcgagtttggattctgccagcacacgggcgttattcagtccgtagctttcttctccgccgtcggtgccgccggtgaacaagagaatatcgggctgcgtttcttccagtgcctggatatcacggcggttcagcttgtaggcgtaatattgcgcaattttagcacccgcagagtgagcggttactttcgcggtttccagggtgatagaaggcaccaatcccattgcggcaaccgccagcccacctttggcagaggaggaatacttcaatgcaacctcaccgctgtttaacagggggagggcattatctacgtttaacacctggttcaggctggagaaaaaccccttcgccagatgatgggtggtggttggggtcagtacgtggttaaccnnnnnnnnnncgtccccctcccgggtaaagagggctgctttggtccacgtcgatccaatatcgacagagacgatttgcatcagatagcctcttcaagaatacgagtatcaacgtcatgacgttggttgatatcgtgggccatcagctggcaaacatcttctaagtcatgacttggggcaaagacgcgatcaaatcccatctctttgaatttggtttccacgtcagcgaagtcatgttttccgaccaccaggttaccgcccacatagagcaggatgtcccccagtccacgctcgatgcagcgttcgcgcatgcccagacagtcgatatcgccatgcccatagatagaggagacgacaatcgcgtcagcgccagtttcaatggcagcatcaatatattcgtcctggctgaccattacgcccagattaatgactctgaagtcgtggttgctaaaaacgcggtccagaactttattgcctactgcatggcagtccgcgccaataacgccaatcacaagtgttgctttcttcatgggtaatcctttgtaagacagagagtaaaataagttacacacgtcgtatttatggccgttcataacggcacaggtttaatatcacaggagtgtctttatctgaccgtaatgttgcaattgatctattttcaaaatgtctttcgggaaatgattgtttaaagtgtgtttttaaatttccatgttaattcagtgtgttatgtcaactaatgtcatgagtgttaannnnttaaaattaacttgatttaatgtattgagataattgtgatctacttctaatttgcatttttgtgacgtggttttagccatgagtaaatgcatttcataagatttaagtcgaatttcactgcaattcatctctgcttaatgtaaaaataatgttgaaaataacaaatggttaatgattcatgcgaattatgaccttagttagctcttttaatttttcgtaaaaaagagaggtacatgaaggtgctatcagtatgagtaacgttaatcaaaggttttattacgtctggcaataacgcaggccatttttcgcgacagggtggatttaatcagtataatcctcatacaatagttcacgattaactgaaccgttaacggggatttggtgttgaaatttagaaatggcggagtcaattaatgaagacaatatcgaaaaaatgactgtgtcagaattaatttcaattaatccttctcgttgttgaccaaaaaagatatttatcttgatttcatttgtactacggcaatcaatatgtagtaatttttgatcgctgagattttctgtttcataaatgtttttggcgagagtcgggtgtattgatgccagacatctgctcagataagccatatcctttagggaacaccccgctgagtagaggatgtcagagaatttttgtgtgtcaactgttgtctctgaagcgtatgttgcattgactggaagggtattgaaagagatctgagatggtatcattatttaaatctttccgtgagtaataaaaattaatccccaggcattgtttagcaatatttgccataggggatatatagaaaattaaagtattttattggcttcggttaactgatctataaccagtgccagattggtaaacattttgaaaaagcgatactggctcggaatatctctttcaaagacgaaacattcaatgtcattgtttgaaaaataaaggactagtgttgctgattcgtcagggaaaacatggaaatgtatctggttaccagaaggaggatagtccagaagaagggtatctttgcctgtcacatacctgttnnnntcgtggacgctacgctcacacttcatcagaggtgtcaggatactcatgtattcatctgatgttaatttattaaaatcatcattcattttaaagaaacgataaagtaacagtacatcctcttgcgtaaccggttcgtttgtttttagagggaaataagcgggaaccagaagatgaggttctaatctattttgttgagcgctataactgaatttgaacataaattccggatcgctcatcaattgagcgacataattatgcctggcttcgaaaattttaatttttatcaggttaaataagtctgtttcgtcatcctgtattacaagacattggccatagcagccaggttttttttcattataagcagaaacggttattctgtcagaggtgtcaacgttatattcaaaagccagatagtgaccttcttcatcgcgatttgtttccagattatttaaattcatcacatgaagtgtttgcaatgctgattcaatgagctgttgactctctgaggtaaatgtttcgcgctgcgttgtataaagtgtatcaattccaacgactatccgatgtgggtcaaggatggcggcaatcatctttattacctgcacagtcacgggtgatgtcattgattctttatctgtttttagagaatcattagatggccaacctgagaagcgattgacagccgaaccgatattatcaggactcatagcagcaacctcattgtaatcaagcgaggcgctgagcgtactcggctatagaaaaactaacttgcaaaaatcgctcatttttcatttatcaggcgaaagtggcctctgttcactcagaaacaatcactcccggtaagtcatacctgtttcatcgatacatttaagtgattattactaatgaaacaataacataacgggcttacggtcggtgctcataaaggcaacaatcaattaactttgataaaaatatgttatgtaaaatagcaacaaattggctactctaatcaattggtattataaaaagtggataaggcggttctgttaaataaaatactggttttttatctataccttttcattgtaataattgtgttgcataaatatttcacaataaattaacaataaaatcaccaatgatctatggtttatacataattaacatatttggttggttttgatataaatcaatttttaattcttgaaaaaaatctgcaaaacacgataaattgtcgtagatcaaattggtgagatcgtgacaatttcgctataaattgatcactgtcgaaaaatgcaaatttgctcaataaaaacctgtttattgtaaggattttgcggcgtaatataattacgggatcaatttggtttattcattaacatatttgtaacttttttatcattgtcttttcctcttttgatgaaatggcaacgatagaggcgagcaaataattttgtattggggcatgcgtgtgaccctttctaacggggttcactctcggagtcttcatgcgatgagcaaggagtcatgatgttagatatagtcgaactgtcgcgcttacagtttgccttgaccgcgatgtaccacttcctttttgtgccactgacgctcggtatggcgttcctgctggccattatggaaacggtctacgtcctttccggcaaacagatttataaagatatgaccaagttctggggcaagttgtttggtatcaacttcgctctgggtgtggctaccggtctgaccatggagttccagttcgggactaactggtcttactattcccactatgtaggggatatcttcggtgcgccgctggcaatcgaaggtctgatggccttcttcctcgaatccacctttgtaggtctgttcttcttcggttgggatcgtctgggtaaagttcagcatatgtgtgtcacctggctggtggcgctcggttcaaacctgtccgcactgtggattctggttgcgaacggctggatgcaaaacccaatcgcgtccgatttcaactttgaaactatgcgtatggagatggtgagcttctccgagctggtgcttaacccggttgctcaggtgaaattcgttcacactgtagcgtctggttatgtgactggcgcgatgttcatcctcggtatcagcgcatggtatatgctgaaaggtcgtgacttcgccttcgctaaacgctcctttgctatcgctgccagcttcggtatggctgccgttctgtctgttattgttctgggtgatgaatccggctacgaaatgggcgacgtgcagaaaaccaaactggctgctattgaagctgagtgggaaacgcaacctgcgcctgctgcctttactctgttcggcattcctgatcaggaagaggagacgaacaaatttgcgatccagatcccttacgcgctgggcataattgcaacgcgttccgtggatactccagttatcggcctgaaagaactgatggtgcagcatgaagaacgcattcgtaacgggatgaaggcgtactctctgctcgaacaactgcgttctggttctaccgaccaggcggttcgtgaccagttcaatagcatgaagaaggacctcggttacggtctgctgctgaaacgctatacgccaaacgtggctgatgcgactgaagcgcagattcaacaggcaaccaaagactccattccgcgtgtagcgccgctgtacttcgcgttccgtatcatggtggcgtgtggcttcctgctgctggcaatcatcgcgctctctttctggagtgtcatccgcaaccgcattggcgagaaaaaatggctcctgcgcgccgcgctgtacggtattccgctgccgtggattgctgtagaagcgggctggttcgtggctgaatatggccgccaaccgtgggctatcggtgaagtgctgccgacagctgtggcgaactcgtcactgaccgcaggcgatctcatcttctcaatggtgctgatttgcggcctgtataccctgttcctggtggcagaattgttcttaatgttcaagtttgcacgcctcggcccaagcagcctgaaaaccggtcgctatcactttgagcagtcttccacgactactcagccggcacgctaagacaggagtcgtcaaatgatcgattatgaagtattgcgttttatctggtggctgctggttggcgttctgctgattggttttgcagtcactgatggtttcgacatgggggtgggcatgctcacccgtttcctcggtcgtaacgacaccgagcgtcgaattatgattaactccatcgcaccacactgggacggtaaccaggtttggctgatcaccgcaggcggcgcactgtttgctgcctggccgatggtctatgccgctgcgttctccggcttctatgtggcgatgatcctcgtgctggcgtctttgttcttccgtccggtcggttttgactaccgctccaagattgaagaaacccgctggcgtaacatgtgggactggggcatcttcattggtagcttcgttccgccgttggtgattggtgtagcgttcggtaacctgttgcagggcgtaccgttcaacgttgatgaatatctgcgtctgtactacaccggtaacttcttccagctgcttaacccgttcggcctgctggcaggcgtggtgagcgtagggatgatcattactcagggcgcaacctatctgcaaatgcgtaccgtgggcgaactgcacctgcgtacccgtgcaacggctcaggtggcggcactggtgacactggtctgtttcgcactggctggcgtatgggtgatgtacggtatcgatggttatgtcgtgaaatcgacaatggaccattacgcagcctctaacccgctgaataaagaagtggttcgtgaagctggcgcatggctggttaacttcaacaacacgccaattctgtgggctattccggcactgggtgtggttctgccgctgctgaccatcctgactgcacgtatggataaagccgcgtgggcgtttgtgttctcctccctgacgctggcctgcatcatcctgactgccggtatcgcaatgttcccgtttgtgatgccgtccagcaccatgatgaacgcaagtctgacaatgtgggatgcaacttccagccagctgacacttaacgtcatgacctgggttgcggtggttctggtaccgatcattctgctctacaccgcctggtgttactggaaaatgttcggtcgtatcaccaaagaagatattgaacgtaacacccactctctgtactaagtaaggagctaaaaatgtggtatttcgcatggattctgggaacgcttcttgcctgttcgtttggggtaatcaccgcgctggcgcttgagcacgtcgaatcaggcaaagccggtcaagaagacatctgatgagtaagattatcgcaaccttgtatgcggtaatggacaagcgccccctgcgggcgctttccttcgtgatggcgcttctgttagcaggatgtatgttttgggacccatctcgtttcgccgcgaagaccagtgaactggaaatctggcatggtttattgctgatgtgggccgtctgtgctggtgtgattcacggcgtgggctttcgtccgcagaaggttctttggcaagggattttttgcccattgcttgccgatattgttctcattgtcgggctgattttcttcttcttttaaatcagaattctctttaaaaaattatgggccgtgccaggcccataaatttttacgctcccttaacttgccctcattcccaaacctcaatcgcgcgcgtatagtagcagcgtttaaaagctctaacttttgttgcattaccgggatgtaaagtgaatacaacgctgtttcgatggccggttcgcgtctactatgaagataccgatgccggtggtgtggtgtaccacgccagttacgtcgctttttatgaaagagcacgcacagagatgctgcgtcatcatcacttcagtcaacaggcgctgatggctgaacgcgttgcctttgtggtacgtaaaatgacggtggaatattacgcacctgcgcggctcgacgatatgctcgaaatacagactgaaataacatcaatgcgtggcacctctttggttttcacgcaacgtattgtcaacgccgagaatactttgctgaatgaagcagaggttctggttgtttgcgttgacccactcaaaatgaagcctcgtgcgcttcccaagtctattgtcgcggagtttaagcagtgactgacatgaatatccttgatttgttcctgaaggctagccttctggttaaacttatcatgttgattttgattggtttttcaatcgcatcctgggccattattatccagcggacccgtattcttaacgcagcggcgcgcgaagccgaagcgtttgaagataaattctggtctggaatcgaactctctcgcctctatcaagagagccaggggaaacgggataatctgactggttcggaacaaatcttttacagcgggttcaaagaatttgtgcgcctgcatcgtgccaatagccatgcgccggaagccgtagtggaaggggcgtcgcgtgcgatgcgtatttccatgaaccgcgaacttgaaaatctggaaacgcacattccgttcctcggtacggttggctccatcagcccgtatattggtctgtttggtacggtctgggggatcatgcacgcctttatcgccctcggggcggtaaaacaagcaacactgcaaatggttgcgcccggtatcgcagaagcgttgattgcgacggcaattggtctgttcgccgctattccggcggtaatggcttataaccgtctcaaccaacgtgtaaacaaactggaactgaattacgacaactttatggaagagtttaccgcgattctgcaccgccaggcgtttaccgttagcgagagcaacaaggggtaagccatggccagagcgcgtggacgaggtcgtcgcgatctcaagtccgaaatcaacattgtaccgttgctggacgtactgctggtgctgttgctgatctttatggcgacagcgcccatcatcacccagagcgtggaggtcgatttgccagacgctactgaatcacaggcggtgagcagtaacgataatccgccagtgattgttgaagtgtctggtattggtcagtacaccgtggtggttgagaaagatcgcctggagcgtttaccaccagagcaggtggtggcggaagtgtccagccgtttcaaggccaacccgaaaacggtctttctgatcggtggcgcaaaagatgtgccttacgatgaaataattaaagcactgaacttgttacatagtgcgggtgtgaaatcggttggtttaatgacgcagcctatctaaacatctgcgtttcccttgcttgaaagagagcgggtaacaggcgaacagtttttggaaaccgagagtgtcaaaggcaaccgaacaaaacgacaagctcaagcgggcgataattatttcagcagtgctgcatgtcatcttatttgcggcgctgatctggagttcgttcgatgagaatatagaagcttcagctggaggcggcggtggttcgtccatcgacgctgtcatggttgattcaggtgcggtagttgagcagtacaaacgcatgcaaagccaggaatcaagcgcgaagcgttctgatgagcagcgcaagatgaaggaacagcaggctgctgaagaactgcgtgagaaacaagcggctgaacaggaacgcctgaagcaacttgagaaagagcggttagctgctcaggaacagaaaaagcaggctgaagaagccgcaaaacaggccgagttaaagcagaagcaagcggaagaggcggcagcgaaagcggcggcagatgctaaagcgaaggccgaagcggatgataaagctgcggaagaagcagcgaagaaagcggctgcagacgcgaagaaaaaagcagaagcagaagccgccaaagccgcagccgaagcgcagaaaaaagccgaggcagcagctgcggcgctgaagaagaaagcggaagcggcagaagcagctgcagctgaagcaagaaagaaagcggcagcagagaaagctgcagccgacaaaaaagcagcagaaaaagcggctgctgaaaaggcagcagctgataagaaagcagcggcagaaaaagccgccgcagacaaaaaagcggcagctgcaaaagcagcagctgaaaaagccgctgcagcaaaagctgccgcggaggcagatgatattttcggtgagctaagctctggtaagaatgcaccgaaaacggggggaggggcgaaagggaacaatgcttcgcctgccgggagtggtaatactaaaaacaatggcgcatcaggggccgatatcaataactatgccgggcagattaaatctgctatcgaaagtaagttctatgacgcatcgtcctatgcaggcaaaacctgtacgctgcgcataaaactggcacccgatggtatgttactggatatcaaacctgaaggtggcgatcccgcactttgtcaggctgcgttggcagcagctaaacttgcgaagatcccgaaaccaccaagccaggcagtatatgaagtgttcaaaaacgcgccattggacttcaaaccgtaatcgcgatgttgactgttccgacggtcaacatcaggcaccggttgccacggggttctggtagttttgtgtattttagtttgttaacattctgctaaattatcgtgggccatcggtccagataagggagatatgatgaagcaggcattacgagtagcatttggttttctcatactgtgggcatcagttctgcatgctgaagtccgcattgtgatcgacagcggtgtagattccggtcgtcctattggagttgttcctttccagtgggcgggncctggtgcggcacctgaagatattggcggcatcgttgctgccgacttgcgtaacagcggtaaatttaatccgttagatcgcgctcatctgccacagcagccgggtagtgcgcaggaagtacaaccagctgcatggtccgcgctgggtattgacgctgtagttgtcggtcaggtcactccgaatccggatggttcttacaatgttgcttatcaacttgttgacactggcggcgcaccgggtactgtacttgctcagaactcgtacaaagtgaacaagcagtggctgcgttatgctggtcataccgccagtgatgaagtgtttgaaaaactgaccggtattaaaggtgcgttccgtacccgtattgcctacgttgttcagaccaacggcggtcagttcccgtatgaactgcgcgtatctgactatgacggttacaaccagtttgtcgttcaccgttcaccacagccgctgatgtccccggcgtggtcaccagacggttctaaactggcttatgtgaccttcgaaagcggtcgttccgcgctggttatacaaacgctggcaaacggcgctgtacgtcaggtggcttcattcccgcgtcacaacggtgcgcctgcattctcgccagacggcagcaaactggcattcgccttgtcgaaaaccggtagcctgaacctgtacgtaatggatttggcttctggtcagatccgccaggtgactgatggtcgcagtaacaataccgaaccgacctggttcccggacagccagaacctggcatttacttctgaccaggccggtcgtccacaggtttataaagtgaatatcaacggcggtgcgccacaacgtattacctgggaaggttcgcagaaccaggatgcggatgtcagcagcgacggtaaatttatggtaatggtcagctccaatggtgggcagcagcacattgccaaacaagatctggcaacgggaggcgtacaagttctgtcgtccacgttcctggatgaaacgccaagtctggcacctaacggcactatggtaatctacagctcttctcaggggatgggatccgtgctgaatttggtttctacagatgggcgtttcaaagcgcgtcttccggcaactgatggacaggtcaaattccctgcctggtcgccgtatctgtgataataattaattgaatagtaaaggaatcattgaaatgcaactgaacaaagtgctgaaagggctgatgattgctctgcctgttatggcaattgcggcatgttcttccaacaagaacgccagcaatgacggcagcgaaggcatgctgggtgccggcactggtatggatgcgaacggcggcaacggcaacatgtcttccgaagagcaggctcgtctgcaaatgcaacagctgcagcagaacaacatcgtttacttcgatctggacaagtacgatatccgttctgacttcgctcaaatgctggatgcacatgcaaacttcctgcgtagcaacccgtcttacaaagtcaccgtagaaggtcacgcggacgaacgtggtactccggaatacaacatctccctgggtgaacgtcgtgcgaacgccgttaagatgtacctgcagggtaaaggcgtttctgcagaccagatctccatcgtttcttacggtaaagaaaaacctgcagtactgggtcatgacgaagcggcatactccaaaaaccgtcgtgcggtactggtttactaagagaattgcatgagcagtaacttcagacatcaactattgagtctgtcgttactggttggtatagcggccccctgggccgcttttgctcaggcaccaatcagtagtgtcggctcaggctcggtcgaagaccgcgtcattcaacttgagcgtatttctaatgctcacagccagcttttaacccaactccagcaacaactctctgataatcaatccgatattgattccctgcgtggtcagattcaggaaaatcagtatcaactgaatcaggtcgtggagcggcaaaagcagatcctgttgcagatcgacagcctcagcagcggtggtgcagcggcgcaatcaaccagcggtgatcanagcggtgcggcggcatcaacgacgccgacagctgatgctggtactgcgaatgctggcgcgccggtgaaaagcggtgatgcaaacacggattacaatgcagctattgcgctggtgcaggataaatcccgccaggatgacgcaatggtggcatttcagaatttcatcaaaaattaccctgattcaacttacctgccaaacgccaattattggctgggtcagttaaactacaacaagggtaaaaaagatgatgcggcgtactattttgcttcggtagtgaaaaactatccgaagtcaccaaaggctgcagatgcgatgtttaaagtcggcgtcatcatgcaggacaaaggtgacaccgcaaaagcgaaagccgtataccagcaggttatcagtaaataccctggtactgatggcgctaaacaggcacaaaaacgtctgaacgcgatgtaatgcataacacacgaccagaagtcgcattatttctggtcgtgtcgtgcgaatcataagcagttgagtgatctacatcgaaatttttgttgcgctcaagtctgaaatcagtaatatatgccgccgttgccacgggatatcaaacaaaccgaaagcaacgaaaaagtgggtcgttagctcagttggtagagcagttgacttttaatcaattggtcgcannnncgaatcctgcacgacccaccactaacctagttagttgtagtatccagcgtaatatcgggtgattagctcagctgggagagcacctcccttacaaggagggggtcggcggttcgatcccgtcatcacccaccaccgggtcgttagctcagttggtagagcagttnnctnnnnnnnnnnnnnnnnnnnnnnnnnnncctgcacgacccaccactaattacggtgggttcggtggaagtagtttgtagtatccagcgcagtatcgggtgattagctcagctgggagagcacctcccttacannnnnnnnnnnngcngttcgatcccgtcatcacccaccactcgggtcgttagctcagttggtagagcagttgacttttaannnnnnnnnnnnnnnnnnnnnnnctgcacgacccaccaattttaacatcaaactcagatgttaagcgtgaaggataacgttgcgtcagcaacggcccgtagggcaagcgaagcgagtcatcctgcacgacccaccaattttaaagattggttccgagtagaaatctttcaggtaacacccgtatgggtcgttagctcagttggtagagcagttgacttttaatcaattggtcgcaggttcgaatcctgcacgacccaccaatgtaaaaaagcgccctaaaggcgcttttttgctattcaggcatctctcaatttcaattcttgaccctgatgacatactccgcgcttgctgcgtaaacaactttacgtcggaggaataagacgcaaagtgtggcattcggcatctcatacgtaattcgagtgacttttccccaccattcgactatcttgtttagcatataaaacaaattacaccgataacagcgaatatcacgctaatgtcggttttaacgttaagcctgtaaaacgagatggtaagatgagcgtgatgtttgatccagacacggcgatttatcctttccccccgaagccgacgccgttaagcattgatgaaaaagcgtattaccgcgagaagataaaacgtctgctaaaagaacgtaatgcggtgatggttgcccactactataccgatcccgaaattcaacaactggcagaagaaaccggtggctgtatttctgattctctggaaatggcgcgcttcggtgcaaagcatcccgcttctacgttgttagtcgctggggtgagatttatgggagaaaccgccaaaattctcagtccggaaaaaacaattctgatgccgacacttcaggctgagtgttcactggatctcggctgccctgttgaagaatttaacgcattttgcgatgcccatcccgatcgtactgtcgtcgtctacgccaacacttctgctgcggtaaaagcgcgggcagattgggtggtaacttcaagcattgccgtcgaacttattgatcatctggatagtttgggtgaaaaaatcatctgggcacccgacaaacatctggggcgttacgtgcaaaaaaagacgggckcagacattttatgctggcagggtgcctgcattgtgcatgatgagtttaagactcaggcgttaacccgcttgcaagaagaatccccggatgctgccatactggtgcatccagaatcaccacaagctattgtcgatatggcggatgcggtcggttccaccagtcaactgatcgctgctgcgaaaacattgccacatcagaggcttattgtggcaaccgatcggggtattttctacaaaatgcagcaggcggtgccagataaagagttactggaagcaccaaccgcgggtgagggcgcaacctgccgcagctgcgcgcattgtccgtggatggccatgaatggcctccaggccatcgctgaggcattagagcaggaaggaagcaattacgaggttcatgttgatgaaaggctgcgagagagggcgctggtgccgctcaatcgtatgctggattttgcggctacactacgtggataacgaataataaggcgtaacgttacgctttgggggaaagatggatttttttagtgtgcagaatatcctggtacatataccaataggagcaggcggttatgatctctcatggatcgaagcggtaggcacaatcgccgggttgctgtgtattggccttgccagtctggagaagatcagcaactacttctttggcctgatcaacgtcaccttgtttggcattattttctttcagattcagctgtatgccagcctgctattacaggtgtttttctttgccgcgaatatttacggctggtatgcgtggtcgcgacaaaccagtcagaacgaggcggagttaaaaattcgctggttgccattgccgaaggcactcagctggttggcggtttgcgttgtttcgattggtctgatgacggtatttatcaatccggtgtttgcatttttgacccgcgtggcagtcatcatcatgcaagcattaggattacaggttgcgatgcctgaactacaaccggacgctttcccgttctgggattcttgcatgatggtgttatctatcgtggcaatgattctgatgacgcgtaagtatgtggaaaactggctgttgtgggtgattattaacgtgattagcgtcgttatttttgcacttcagggcgtttacgccatgtctctggagtacatcatcctgacctttattgcgctcaacggcagccggatgtggatcaatagcgcacgcgaaagaggctcacgcgcgctgtcccattaatggtgatgatgtgaatggccagacaccccttcattcaggtggcagtctggcccatgacaaggttgatattccatctgaatggtggcgtgctcaatctgatagtgatccatcaggtagtgttggatctgatccaacaaggcatcgtgatcgtgtggcgggatcacctgcacatgcaacgtcatcaccggcttctcgcctaccatccatacatgcacatggtgcacattgcggacttccgggatttcccggcacatacgacgcttcagttcagcgatatccagcgataccggtgcaccctcaagtaattcattcacgctatctttcaacagtcgccacgcgctacgcagaaccagaagcgacaccagtatcgagagaatggggtcagcaggtgtccagccggtccagataataatcaacgcggcaataatagccccaaccgaacccagcaggtccccgagcacatgcagtgccgctgctcgtacgttgaggtttttctcttcgctgccgtgatgaagtaaccagaaagaaagtatatttgccagcaacccagccacggcaattgccatcatcatgccgccctcgaccggacgcggcgtgcggaagcgttctatcgcctcccagacaatcaaaatggtaattaccacgagggcgatggcattcacaaacgccgcgagcgtggtcaatcttagccaaccgaaagtgtggcgaatggtgggaggacgacgtgaaaattgcacggcgagtagggcgaaaagcagggcggcagtatcggtcaacatatgacccgcatcggccagcaaagccagagaaccggaaagaaaaccaccaatgacttctaccagcataaacccggcagtcacgccgaaagcatacaacaagcgacgagcattattatcttctggcaggtgtgaggacgtgtgtgagtgcgccatgacgagtcatcccttaattattctcacttaactttatgacatcatactgcttttagaagggaaaaattaaaagggagagactccgctctcccattattggctattttgcagggttactgcgtggtaccgtcggttttggtatcgacatcattattgatgccatcaccggtttgtacctttttattgatatccgggcagcgaccatctttgcacatggtgttcttgtgctcttcatctttggtcatgccgtcattgttcattgaagaaccatccggatgcagcatagtgccgccagaaccggtatttaccccgttattgtcgacgttatttggcgcgacattttcacgggcgtcaggggctacctggcccgcatcagctgcggcgtttgcctggccgttattggtttgcgctccgctatcggcagccagtgcggcaccgctggcaaggcttagagtggcagtcagaaatagtgtggccagttttgtcattttcataggatgctcctgttatggtcgttatgtcggataacctcttccaacagtgcatttgcaggtgaatataaggcattggtttaagatttcagccaggcaaagaaatccagcagagaatcttgaaataattaacaaacaaaggagttacagttagaaattgtaggagagatctcgtttttcgcgacaatctggcgtttttcttgctaattccaggattaatccgttcatagtgtaaaaccccgtttacacattctgacggaagatatagattggaagtattgcattcactaagataagtatggcaacactggaacagacatgaattatcagaacgacgatttacgcatcaaagaaatcaaagagttacttcctcctgtcgcattgctggaaaaattccccgctactgaaaatgccgcgaatacggttgcccatgcccgaaaagcgatccataagatcctgaaaggtaatgatgatcgcctgttggtggtgattggcccgtgctcaattcatgatcctgtcgcggctaaagagtatgccactcgcttgctggcgctgcgtgaagagctgaaagatgagctggaaatcgtaatgcgcgtctattttgaaaagccgcgtactacggtgggctggaaagggctgattaacgatccgcatatggataacagcttccagatcaacgacggtctgcgtatagcccgtaaattgctgcttgatattaacgacagcggtctgccagcggcgggtgaattcctcgatatgatcactcctcagtatctcgctgacctgatgagctggggcgcaattggtgcacgtaccacggaatcgcaggtgcaccgcgaactggcgtctggtctttcttgtccggtaggttttaaaaatggcacagacggtacgattaaagtggctatcgatgccattaatgccgccggtgngcngcactgcttcctgtccgtaactaaatgggggcattcggcgattgtgaataccagcggtaacggcgattgccatatcattctgcgcggcggtaaagagcctaactacagcgcgaagcacgttgctgaagtgaaagaagggctgaacaaagcaggtctgccagctcaggtgatgatcgatttcagccatgctaattcgtccaaacaattcaaaaagcagatggatgtttgtgctgacgtttgccagcagattgccggtggcgaaaaggccattatcggtgtgatggtggaaagtcatctggtggaaggcaatcagagcctggagagcggggagccgctggcctatggtaagagcatcaccgatgcctgcattggctgggaagataccgatgctctgttacgtcaactggcgaacgcagtgaaagcgcgtcgcgggtaaagtttaattgtcggatgcgccgtcagantggcgtatccgatgaatcaccgtagccctgacaagacgcgcagcgtcgcatcaggcaatgtgctccattgttagcgacgacaaacaaaaaagccgactcacttgcagtcggctttctcatttttaaacgaatgacgtttacttcgctttaccctggttcgcaacggctgctgctttcgccgcgatctcgtcagcattacccagataatagcgtttcagcggtttgaagttctcgtcaaactcataaaccagcggcacgccggtcgggatattcagctcaagaatctcttcttcgctcatgttatcgagatatttcaccagcgcacgtaacgagttaccgtgtgcagcgatgattacgcgctcaccgctcttcatacgcggcagaatggtttcattccagtaagggatcacgcggtcaatggtcagcgccaggctttccgtcagcggcagttctttctcgctcagtttcgcgtaacgcggatcgtgacccggataacgctcatcatctttagtcagttccggcggagtcactgcaaaaccacgacgccactgtttcacctgctcgtcgccatatttttcagcagtttccgctttgttcagaccctgcaacgcaccgtagtgacgttcgttcagtttccaggatttctcaacgggcagccatgcctgatccagttcgtccagcacattccacagggtatggatagcgcgtttcagcacagaggtgtaagcaaagtcaaagctgtaaccttcctctttcagcagcttacctgctgcttttgcttcgcttacgcctttctcagacagatccacgtcgtaccaaccggtgaaacggttttctttgttccactgactttcgccatgacgaaccagaaccagcttagttacagccatatacttactcctcaaatcatcttttaatgataataattctcattatattgccgtgacgaagcaacagcaatgcttacgcataaccatagcgaaaatagtggcgcagtgtaaggttgttgtgaatattgagttgcaaatatgtcggtgtttgctggtgatttgaacaatatgagataaagccctcatgacgagggcttaacattactcagcaataaactgatattccgtcaggctggaatactcttcaccaggatgcaggaaacagtccggttgcggccattcagggtggttcgggctgtccggcagaaactcgctttccaacgccagcccttgccagtcggcgtaaggttcggttccccgcgacggtgtgccgccgaggtagttgccggagtagaattgcagagccggagcggtggtgtagaccttcagctgcaatttttcatctgctgaccagacatgcgccgccactttcttgccatcgcctttggcctgtaacaagaatgcgtgatcgtaacctttcactttgcgctgatcgtcgtcggcaagaaactcactggcgatgattttggcgctgcggaaatcaaaagacgttccggcgacagatttcaggccgtcgtgcggaataccgccttcatcaaccggcagatattcgtccgccagaatctgcaacttgtgattgcgcacgtcagactgcttgccgtcaagattgaaatagacgtgattagtcatattcaccgggcaagatttatcaactgtggcgcgataagtaatggagatacggttatcgtcggtcagacgatantgcaccgtcgcgccgagattacccgggaagccctgatcgccatcatctgaactcagggcaaacagcacctgacgatcgttctggttcacaatctgccagcgacgtttgtcgaacccttccgggccgccgtgcagctggttaacgccctgacttggcgaaagcgtcacggtttcaccgtcaaaggtataacgactattggcgatgcggttggcataacgaccaatagaggcacccagaaacgcggcctgatcctgatagcattccgggctggcacagccgagcagcgcctcgcggacgctgccatcggaaagcggaatacgggctgaaagtaaagtcgcaccccagtccatcagcgtgactaccatccctgcgttgttacgcaaagttaacagtcggtacggctgaccatcgggtgccagtgcgggagtttcgttcagcactgtcctgctccttgtgatggtttacaaacgtaaaaagtctctttaatacctgtttttgcttcatattgttctgcgacagcttgctgtacggcaggcaccagctcttccgggatcagcgcgacgatacagccgccaaatccgccgccggtcatgcgtacgccacctttgtcgccaatcacagctttgacgatttctaccagagtgtcaatttgcggcacggtgatttcgaaatcatcgcgcatagaggcatgagactccgccatcaactcgcccatacgtttcaggtcgccttgctccagcgcgctggcagcttcaacggtgcgggcgttttcagtcaggatatgacgcacgcgtttcgccacgattgggtccagctcatgtgcaacagcgttgaactcttcaatggtgacatcgcgcagagctggctgctggaagaaacgcgcaccggtttcgcactgttcacgacgggtgttgtattcgctgccaaccagggtacgtttgaagttactgttgatgatgacgacagccacacctttcggcatggaaactgctttggtccccagtgagcgacagtcaatcagcaaggcatgatctttcttgccgagtgcggaaattagctgatccatgatcccgcagttacagccaacaaactggttttctgcttcctgaccgttaagcgcgatttgtgcgccgtccagcggcagatgataaagctgctgcaatacggttccgaccgcgacttccagtgaagcggaagaacttaacccggcaccctgcggcacattgccgctgatcaccatgtccacaccgccgaagctgttgttacgcagttgcagatgtttcaccacgccacgaacgtagttcgcccattgatagttttcatgcgcgacaatgggcgcatcaagggaaaactcatcaagctgattttcataatcggctgccattacgcgaactttacggtcatcgcgtggcgcacagctgatcacggtttgataatcaatcgcgcagggcagaacgaaaccgtcgttgtagtcggtgtgttcaccaatcaaattcacgcggccaggcgcctgaatggtatgagtggcagggtagccaaatgcgttggcaaacaganattgtgttttttctttcagantcatttcttacactccggattcgcgaaaatggatatcgctgactgcgcgcaaacgctctgctgcctgttctgcggtcaggtctcgctgggtttctgccagcatttcataaccaaccataaatttacgtacggtggcggagcgcaacagaggcggataaaagtgcgcgtgcagctgccagtgttgattctcttcgccattaaacggtgcgccgtgccagcccatagagtangggaaggagcactggaagaggttgtcataacgactggtcagctttttcaacgccagtgccaaatcgctgcgctgggcgtcggtcaaatcggtgatccgcaaaacgtgggctttgggcagaagtagcgtttcgaacggccaggcagcccagtaaggtacaactgctaaccagtgttcggtttcgacaacggtacggctaccgtctgccagctcgcgctgaacataatccaccagcattggcgatttctgctcggcaaaatattctttttgcaggcggtcttcgcgctcagcttcgttaggcaggaagctatttgcccaaatctgtccgtgcggatgcgggttagagcagcccatcgccgcacctttgttttcaaagacctgcacccacgggtatgttttccccagttctgcggtttgctcctgccaggttttgacgatttccgtcaatgccgcaacgctcagttctggcagcgttttactgtgatccggtgaaaagcagatcacccggctggtaccgnnngcgctctggcaacgcatcaaaggatcgttgctttctggcgcatctggcgtgtcagacatcaaggccgcaaagtcattagtgaaaacgtaagtcccggtgtaatcggggtttttatcgcctgtcacccgcacattacctgcgcagaggaagcaatctggatcgtgcgcaggtaacacctgtttggctggcgtttcctgcnnccnnnnccaggggcgcttagcgcggtgcggtgaaaccagaatccattgcccggtgagctggttgtagcggcgatgtggatgatcaacgggattaaattgcgtcatggtcgttccttaatcgggatatccctgtggatggcgtgactgccagtgccaggtgtcctgcgccatttcatcgagtgtgngcgttacgcgccagttcagttcacggtcggctttgctggcgtccgcccagtaggccggaaggtcgccctcgcgacgcggtgcaaaatgatagttaaccggtttgccgcaggctttgctgaaggcattaaccacgtccagcacgctgctgcctacgccagcaccgaggttgtagatgtgtacgcctggcttgttcgccagtttttccatcgccacgacgtgaccgtccgccagatccattacgtggatgtaatcgcgtacgccagtaccgtcttcggtcggataatcgttaccaaaaatcgccagcgagtcgcgacggcctacagcaacctgggcgatgtatggcataaggttattcggaatgccttgcggatcttcgcccatatcgcccgacggatgtgcgccaaccgggttgaagtagcgcagcagggcaatgctccagtccggctgggctttttgcagatcggtgaggatctgttccaccatcagcttgcttttgccgtaagggctttgcggtgtgccggtcgggaagctttcaacgtatggaattttgggctgatcgccannnnnnntggnggagganntaaaaataaagtttttgacgttagcggcgcgcatggcgctaatcaggcgcagagtaccgttgacattgttgtcgtaatattccagcggtttttgtaccgattcgccaacggctttcagcccggcgaagtggatcacggtgtcgatagcgtgatcgtgcaggatctcggtcatcaacgcttcgttacggatatcgccttcaacaaacgtcggatgtttgccgcctaaacgctcgataacaggcagtacgctgcgcttactgttacagaggttatcaagaatgatgacatcatgaccgttttgcagtaattgcacacaggtatgacttccaatgtaaccgctaccaccggtgaccagaactctcataattcgctccattaggcttatggtatgaaataaccatagcataacaaagatgcgaaaagtgtgacatggaataaattagtggaatcgtttacacaagagtttagccgttttttatgcgcgattaagtgattataaaacagagggattgtgaatgattgcgctttttatctgaaaaaaagacgcagtttcatgcntggatgcgtctgaccgtgtgccggataaagcgtttacgccgcatccggcacagtcagcattaccgacttagtttatttttgtcagcgcataatgatagaggccaccgtccggcacgaactccagacgatgggtaatacaagccggcgcatcttcagcatggtgcgaaacaaacaacaattgcgtttcaccttcgctaatcagcacatcaacaaaacggcgaataagctggcgattgagcggatcaagcccctgcaatggttcgtcgagaataagcaacgtcggatgtttcaccagtgcgcggacgatcagcgccagacgctgctgtccccaggaaagactatggaacggagcgtcagccgtgcgtttatcaatgccgagaatatccagccactgctgcaccagtttttgctggcgatccgaaacggcctgataaatgccaatcgaatcaaaatagccagaaagaatcacattacgcacagtagtactgacccggtaatccagatgcaaactactgctgacgtaaccgatatgctttttgatatcccagatggtttcgccgctgccacgacgtcgtccgaaaagcgtcaaatcgttgctgtaaccttgcggatgatcgccagtaatcaggcttaataacgtcgattttcccgcgccatttggcccgacaatttgccagtgttcacctggattcacctgccagctaaggttattaagaatggggcgatcgttataagaaaccacgccattattcagcacaatgcgcggttcgttggcgggtaaggcgtgacgtgctgaaggttcatccggctccggcagttgcacaccttcaagctgttcactatgcgccagttgcgcgacgagtgcttgttggagcagttcctctttagcgccagtttccgctaacgtgcaatccgccagcacgccagcaaactggacaaactccgggatctcatcgaagcgattgagcaccagtaccagagtaataccggactgatgtaacgaggcgagtcgctcagccagctgctgacgtgaggcaacatccaggccatcgaacggctcatcaagaatcaacaagtcaggctccgacatcagcgcctgacacagcagggtttttcgcgtctcgccagtggaaaggtatttaaagcgtcggtcgaggaggggggtaataccgaactgctgtgccagttgcatgcagcgcggtgcatcctttacttcatcctgaataatctcagccgtagtgcgtccggtgtcatcttcgccagggccgagcatatcggtgttattccgctgccattcgtcgctgacgagcttttgcaattgctcgaaggagagacgagtgatgtgggaaaactggctttgccgttcacctttcaaaagcggaagttcccccgccagcgcgcgggccagggccgatttcccgcttccattcgaaccgacaaacgcccaactatcacccgcgtttaacgttagctgaggcaattgcagcgtttttgtgtcgctaagacgaaacgtgccttgcaaaatttgcaacgatgacattttatatcccattttgtgcagcgattactgacagggatacgtgtttcataacaaattgtcaacacgcttagcacagtgtggcgataatcacgctgtcggcattaaagtaggccgtgacattctgtccttgctgaagagaagtcgcttcatttaccggcactgtggcgcacagtgtttgcccgtccggtagcgccattaatacttcgcactgctctgcgccgcgctcaatatgactaataatacccggtaattggttgtcagcgttttgcgcgaccgcttcgtcctgagtaatgcctacccacggcgcttttagcaatatcaacacttctttgccttcatccagccccagacgcgcgccgctttgtgcggtaattgcgactttcaggcgtgtttttccatcagccagtaagacatcaacatgctgttgaacgtcatcatgatcgcgggcggtgatggtaccgaaccactggttacgggcgctggtttggagtgaaaaacgtgagatcgcggccagcaggctgttcagcggcagggcgtcatcgtcacttaacacatcaaaggctttttgctggatttgcgccagtaagtcatagagctgaatcagtcgctgaccatancgggtcagtactgcgccgccgccacctttaccgcctgttgcgcgctcgaccagaatatgctcacttaactgattcatctcgttaatggcatcccaggcgcttttatagctgataccggcatctttcgctccctggctaatggaaccggaaagcgcaatgtgttttagtagcgaaatgcggcgcgggtcggcgaataatttttgttggagcttaagggtgagaaggatttcggcctgcataacaatgtcctggcaaaagtcttattgtgacggaaaacgaacgccacgcaaagctgaccgcacaaaaggggagtgcttttctgtgcttagcggttagaatagtctcatgactatatctggagttgaccatgttagagttattaaaaagtctggtattcgccgtaatcatggtacctgtcgtgatggccatcatcctgggtctgatttacggtcttggtgaagtattcaacatcttttctggtgttggtaaaaaagaccagcccggacaaaatcattgattccctgaatgcccgcttagtcgggcattttctttttctcaacttcctgcttttcctgccgatattttttcttatctacctcacaaaggttagcaataactgctgggaaaattccgagttagtcgttatattgtcgcctacataacgttacattaaggggttaccaatggctcgtaaatggttgaacttgtttgctggggcggcactctctttcgctgttgctggcaatgcactggcagatgaagggaaaatcacggtgttcgccgccgcatcactgactaacgcaatgcaggacattgctacgcagtataaaaaagagaaaggcgtggatgtggtttcttctttcgcttcgtcatctactctcgcccgtcagattgaagcgggtgcccctgcggatctgtttatttctgccgatcagaaatggatggattatgcggttgataaaaaagcgatcgatacagctacgcgtcagacactgctcggcaatagcctggtcgttgtagcaccgaaagccagcgagcagaaagattttaccatcgacagcaaaaccaactggacttcactgctgaatggcggtcgcctggcggttggcgatccggaacatgttcccgctggcatttatgcaaaagaagcactgcaaaaactgggcgcatgggatacgctctccccgaaactggctccggcggaagatgttcgtggcgcgctggcgttggtcgaacgcaatgaagcgccgttgggcattgtttacggttctgacgcagttgccagcaaaggggtaaaagtggttgccaccttcccggaagattcacataaaaaagtggaatatccggttgctgttgtggaagggcataacaatgcgacagtgaaagcattttatgattatctgaagggaccgcaggcagcggaaatctttaaacgttacggatttacaaccaagtaatgatactgaccgatccagaatggcaggcagttttattaagcctgaaagtttcttccctggctgtgctgtttagcctgccgtttgggatcttttttgcctggttactggtgcgttgcacgtttccgggcaaagctctgctcgacagcgtactgcatctaccgctggtgttaccgcccgtggtcgtcggttacttattattagtttcgatggggcggcgcggatttatcggtgaacgtctgtatgactggtttggtattaccttcgcctttagctggcgcggcgcggttctcgctgccgccgtcatgtcgtttccgctgatggtgcgggcaattcgtctggcgctggaaggggttgatgtcaaactggaacaggccgcaagaacactgggggccgggcgctggcgcgttttctttactatcacgttaccgctgaccttaccgggaattattgttggtacggtactggcttttgctcgttctctcggtgaatttggcgcaaccatcacctttgtgtcgaacattcctggtgaaacgcgaaccattccttctgccatgtataccctgattcagacccccggcggggaaagtggcgcagcgagactgtgcattatttctattgcgctggcgatgatctccctgttgatttcagaatggctggccagaatcagccgtgaacgggcggggcgctaatcatgctggaactgaatttttcccagacgttgggcaaccattgcctgactattaatgaaacgctgcccgccaatggcatcactgctatctttggcgtctccggtgccggaaaaacttcgctgattaacgccatcagtggactgacgcgcccgcaaaaagggaggattgtcctcaatggtcgggtactaaatgatgccgaaaaaggtatctgcctgacgccggaaaagcgtcgcgttggctatgtttttcaggatgcgcggctgttcccgcattacaaagtgcgtggcaatctgcgctacggcatggcgaaaagcatggtcgatcagttcgataagctggtggcgcttttaggcattgaaccgttgcttgaccgtttaccaggcagcctgtccggaggcgaaaaacagcgcgtagcgattgggcgggctttgctgacggcaccagaattgctgttgctggatgaaccgctggcgtcactggatattccgcgtaaacgcgaactgttgccttatctgcaacgtctgacgcgggaaatcaacatcccgatgttgtatgtcagccattcgctggatgagatcctccatctggcagacagagtgatggtactggaaaacggtcaggtgaaagcctttggcgcgctggaagaagtctggggtagtagcgtgatgaatccgtggctgccgaaagagcaacaaagtagcattctgaaagtgacggtacttgagcatcatccgcattacgcgatgaccgcgctggcgctgggcgatcagcatttgtgggtcaataagctggacgaaccgctgcaagctgcgctacgtatccgcattcaggcttccgatgtttctctggttttacaaccgccgcagcaaaccagcattcgtaacgtattgcgggcaaaagttgttaatagttatgacgacaacggccaggtggaagtggaactggaagtcggcggtaaaacgctgtgggcgcgtatcagcccgtgggccagggatgaactggcgatcaaacctggcctgtggctgtacgcgcaaattaaaagtgtgtcgataaccgcctgattaaatcaggtggctataaatgaactgggcaatgctgtcggtggtgttatcaccaatcacaatgttggcgcgcgcttttaccgcgtcatcggcgttgcccatcgccacgcctgtaccagcggcctccagcatactgatatcattaaagttatcgccgaacgccacgacgttttccatcgaccagccttgcgcctcaacccatttcgtcaaacgtttacctttgctgttgccgccgcgtgcaatatcaacctgatcgtgccaggaccattcacactccagtcccagttcatgttcgacatgcttaccaaaatgctgcaattgcggcaggtcatcgtgcgtgagggcgaacttccatacggcgttaacttgttgcgccgtttcagccagagaagcgacttgtgtgaaagtcggacgctgttccggcggcagggtttgcgcccagttagacgtgcgaatgacatgcccggtcgggtgctcataaaccatcgcgtcatcgacatacatcagaccgtgaatgtggtgttcattcagcatctcaatgagttgtagggctttattaacgggcattgggtccgcttccagcacggtttttgcatgataatcatacaaataggtgccattacagcaaatagcaggtgtatccagcgccagcgcctgataaaaaggatgaatagcgacgtgatggcgacctgtgacgatgattaattgataacctgcttcgcgagcgcgggccagggcttctatcgatgaaggtagcagggtctttttcggggtcaataaggtgccgtctaagtcgagagcaatcacgcgtgtggtcatggcgtattccagattaaggttaagaattttcttctgcgcgaatggtacaccgataccactatcggacaaaattctgcgttttaattcagcattcaccgccaaaagcgactaattttagctgttacagtcagttgctaaatgcaaaggagcattcatgaagcaaacagtttatatcgccagccctgagagccagcaaattcacgtctggaacctgaatcatgaaggcgcactgacgctgacacaggttgtcgatgtgccggggcaggtgcagccgatggtggtcagcccggacaaacgttatctctatgttggtgttcgccctgagtttcgcgtcctggcgtatcgtatcgccccggacgatggcgcactgacctttgccgcagagtntgcgctgccgggtagtccgacgcatatttccaccgatcaccaggggcagtttgtctttgtaggttcttacaatgcgggtaacgtgagcgtaacgcgtctggaagatggcctgccagttggcgtcgtcgatgtggtcgaggggctggacggttgccattccgccaatatctcaccggacaaccgtacgctgtgggttccggcattaaagcaggatcgcatttgcctgtttacggtcagcgatgatggtcatctggtggcgcaggaccctgcggaagtgactaccgttgaaggggccggcccgcgtcatatggtattccatccaaacgaacaatatgcatattgcgtcaatgagttaaacagctcagtggatgtctgggaactgaaagatccgcacggcaatatcgaatgtgtccagacgctggatatgatgccggaaaacttctccgacacccgttgggcggctgatattcatattaccccggatggtcgtcacttatatgcctgtgaccgtaccgccagcctgattactgtcttcagcgtttcggaagatggcagcgtgttgagtaaagagggcttccagccaactgaaacccagccgcgcggctttaatatcgatcaccgtggtaagtatctgattgccgccgggcaaaaatcgcaccacatctcggtatacgaaattgttggtgagcaggggctactgcatgaaaaaggccgctacgcggtcgggcagggaccaatgtgggtggtggttaacgcacactaaccgctgatttacccggcgcagtctctcctgcgccggtgtattaacctatctcctgtaacgcatgtctctggcgttcgacgatattggtccacaaattgtctttatcgtcagtccacaaattaatcagcaaggcaaaaaagcgttctgctgccggagaaagcacggcatctttgcggcgaataatccccaatgtccgacgtataacgggttccaccagtgggataccaataatagaagaatagggcgcatggggcattgccagaccaggaagcgccgaaattcccagtcccgcctctaccagtcctaatgacgtcgaaagatgacgcacttcgtaaaaccagtccagcttccagggcttgtcggctagctgttgttctatcaacaatcggttgccgctggaggaacgtacgccaatcattttgtaacccactaactcctgccattctacaagctgctttttagccaatggatggtcacgccgacaggccagcacgaacggctcgttgaccagtggggtaaaatcaatggatgaatttgtgacgttgttcatgtttatgccaaagtctgattcgttacacagcaccgattccatgcaattattcgtgccttgttccagaatccgcactttaatattgggatacagctcattaaatttaccgattgccagcggtaaaaaataaaatactgcggtcggaatacacgctaacgtcaccataccacgatgataagcattcatatcacgaatattaaaaagcgtttcatcgaatttctttattaattcccgcgcctctgggagcaacctttttcctgcttttgttaacgtaaccttgcgagttgtacgctcaaatagttgaatatgtaaatcttcctccatcttttttattcttcgtgttaatgcaggttgcgtaatattgagtaatttagcggcattgttaaatgaactggactctgccagtatgacaaatgccttcatacttgataattcatgcttcattattactccgggaaatggaagcgacgattttgggtggctggccgttaaaaattttaactgcatttagccaacttaaattaatgaaaaaatgttattaatcgttgagctaaagtcattagagatgctttgcccttaatgtaaccatatcgcaataagttatgtttttaaattgagggcattattatgaaaaaaataccctgcgtgatgatgcgaggtggaacctcgaggggcgcgttcctgttagcggaacatttacccgaagatcaaacgcagcgcgataaaatattgatggcaattatgggttccggtaacgatctggaaattgacggtattggcggcggtaatccactgaccagtaaagtcgccattattagccgttccagcgatccgcgtgctgatgttgattatctgtttgctcaagttatcgtccatgagaaacgtgtcgataccacgcctaactgcggcaatatgctgtctggcgttggggcattcgccattgaaaatggtttgattgcagcgacttcgccagttacccgcgtacgtatccgcaacgtcaatacgggtacgttcatcgaagctgatgtgcaaacgccaaatggtgttgtcgagtacgagggtagcgccagaattgacggcgtaccgggtactgccgcaccggttgcgctcactttcctgaatgccgctggaacgaaaaccggaaaagttttcccgactgataatcagattgattattttgacgatgtcccggtgacctgtatcgatatggcgatgccagtcgtcattattccggctgaatatctgggaaaaacaggctatgaattaccggcggaactggatgccgacaaagcattattagcccgcattgaatctatccgtctacaagcgggtaaagcaatgggcttaggcgatgtcagtaatatggttatccctaaacctgtgcttatttctccagcgcagaaaggcggggcaattaatgtgcgttattttatgccgcattcttgccatcgcgcgctggcgataaccggtgctattgctatttccagtagttgtgcattggaaggtaccgtcacccgacaaatcgtcccttctgtaggatacggcaatatcaatattgaacaccccagtggtgggctcgacgttcatttaagtaatgaaggtcaggatgccacgacgttacgcgcatctgttattcggacaaccagaaaaatattttccggtgaagtttatcttccctgaaaagattcgttgtcaggataaggacaatcaataaaggacttctgtatgagtcannnnnnaaagaacaggattttaaatgaataagaaatcgttatggaagctaattctgatattagcgatcccatgtattattggctttatgccagctccggcaggattaagcgaactggcgtgggtgctttttggtatttacctggcggccattgtggggctggttatcaagcctttcccggaacctgtcgtactgttaattgccgttgctgcctccatggtggtggtcggtaacttatccgacggtgcgtttaagaccaccgccgtattaagcggttactcttcaggtactacctggctggtgttctcggcgtttaccttaagcgccgcatttgtgaccaccggtttaggtaaacgtattgcctatctgctgattggtaaaatcggtaacaccacgctgggtctgggttacgttacggtattcctcgatctggtattggctccggcaacaccgtctaacaccgcgcgtgcgggcggcattgtgttaccgatcatcaacagcgtggcggtggctttggggtccgaaccggaaaaaagtccgcgtcgtgtcggacattacctgatgatgtccatttacatggtcaccaaaaccaccagctatatgttctttaccgcaatggcggggaacantctggcgctgaaaatgatcaacgacattctgcacctgcaaattagctggggtggatgggcgctggccgccggattgccgggcatcattatgctgctggtcaccccgctggtgatttacaccatgtatccaccagaaattaagaaggtggataacaaaaccatcgctaaagcgggccttgccgaactgggaccgatgaaaatccgcgaaaaaatgctgctcggtgtctttgtgctggcgctgctgggctggattttcagtaagtctctgggggttgatgaatcttcagtggctattgttgttatggcgaccatgctgctgctgggtatcgttacctgggaagacgtggttaaaaataaaggcggctggaataccttaatctggtacggcggtattatcggcttaagctccttattatcgaaagttaaatttttcgaatggttagctgaagtctttaaaaataacctggcatttgatggtcacggtaacgttgctttcttcgttattattttcctcagcatcatcgtgcgttatttcttcgcttccggtagtgcctatatcgttgctatgttaccggtatttgccatgctggcgaacgtctccggcgcaccgttaatgttaaccgcgctggcactgttgttctccaactcctatggcggcatggttactcactatggcggcgcggcaggtccggtcatctttggcgtgggttataacgatattaaatcctggtggttggtcggtgcggtactgacgatattaaccttcctggtgcatatcaccctcggcgtgtggtggtggaatatgctgatcggctggaacatgctgtaaatatactcgtcatacttcaagttgcatgtgctgcgtctgcgttcgctcaccccagtcacttacttatgtaagctcctggggattcactcgcttgtcgccttcctgcaactcgaattatttagagtatatccatttattttcttgctgcgcacttcacggtgcgcagatatctggagcatttgatgatcaagttatctgaaaaaggcgtgtttctcgccagtaataacgaaataattgccgaagaacatttcaccggcgaaannnnaaaagaagaagcaaaaaaaggcactattgcctggtctattctctcttctcataatacgtccggaaatatggataaacttaaaattaagtttgattcattagcctctcacgatattacctttgttggtattgtacagaccgctaaagcgtccggtatggaacgtttcccgctaccgtatgtgctgaccaactgccataactcactctgcgccgnnnnnnnnaccattaacggtgatgaccatgtttttggtttatcggcagctcagcgttatggcggtatttttgtgcctccgcatattgcggtcatccatcaatatatgcgtgagatgatggcaggtggcggcaaaatgatcctcgggtcagacagtcacacccgttacggtgcattagggacaatggcagtcggtgagggcggcggcgagttggtaaaacaattgcttaatgacacctgggatatcgactatccgggagttgttgcggtgcatctgaccggaaaaccagcgccgtatgtggggccgcaggatgtggcgttggctatcatcggtgccgtgttcaaaaacggctacgtcaaaaacaaagtgatggaattcgtaggtcccggtgttgctgcgctctctaccgatttccgtaacagcgttgacgttatgaccactgaaacgacctgtttaagttctgtctggcaaaccgatgaagaagtccataactggctggcgctgcacggtcgcggccaggattactgccagcttaaccctcaaccgatggcgtactacgatggctgcatcagcgttgatttaagcgccatcaaaccaatgattgcgctgccgttccacccgagcaacgtgtatgaaatcgacacactgaaccagaacctgaccgacattctgcgtgagattgaaattgagtccgaacgcgtggcgcacggtaaagccaaactctcgctgctggacaaagtggaaaatggtcgcctgaaagtgcagcaggggattatcgcgggctgttctggcggtaactacgaaaacgtcatcgcggcggcgaatgcactgcgcggtcaatcctgtggcaatgacaccttctcgctggcggtttacccgtcatcacagccggtgtttatggatctcgccaaaaaaggtgtggtagcagatttgattggcgcaggcgcaatcatcagaaccgcgttctgcggcccatgctttggcgcgggcgatacgccaatcagcaacggtttgagtattcgccacaccacgcgtaacttcccgaaccgcgaaggctctaagccagctaatgggcagatgtcagcggtggcgttgatggacgctcgttctatcgctgcgactgcggcaaacggtggctatttaacctctgccagcgaactcgattgctgggacaacgtgccggagtacgccttcgatgtaacgccgtataaaaatcgcgtctatcaaggctttgtgaaaggggcgacccagcaaccgctgatttacggaccgaacattaaagactggccggaattgggtgcgctgactgacaatatcgtcctcaaagtgtgctcgaagatcctcgacgaagtgaccaccaccgacgaattgattccttccggtgaaacctcttcttatcgttcaaatccgattggtctggcggagtttaccctgtcacgccgcgatccaggttatgttggcagaagtaaagcgactgctgagctggaaaatcagcgtctggcggggaatgtcagcgagctgacagaggtgtttgcgcgcattaagcagattgctggtcaggagcatattgatccgctgcaaactgaaattggcagcatggtctatgcggtgaaaccaggcgatggttctgcgcgtgaacaggcggcgagttgtcagcgtgtgattggcggtctggcgaatattgccgaggagtacgcgactaaacgctatcgttctaacgtcatcaactgggggatgttaccgctgcagatggtggaagcgccaacctttgaagtgggggattacatttacatccctggcattaaagcggcgctggataatccgggtacgacgtttaaaggttatgtgatccatgaagatgcgccggtaacggaaattacgctctatatggaaagtctgactgctgaagagcgcgagattatcaaggcgggtagtttgattaacttcaataaaaaccgtcagatgtaaaaagcgccatgtgaatgtaggtcgcattcggcacttattgtcggatgcgatgctggcgcatcttatccgacctacaaatcgcatcgaaccgtaggccggataaggcgtttacgccgcatccggcaaatagttaatagctcttacttcttcgcctctgcaaccactttgctacccacgccgcggttattgtattcccacatgcggttgtagttagtgtcattcanattgcgctgtatttcgtcgctatcgtcaacgctgccggtgttacccgcaaacggacgattagagatcaccgcatcgccccacggtttagccgtgttaaaaccttcgttgatggcgctatcacggatcaccacctgaccgttggtattggcatcaacatccagcgagcggcccagttgtgccacgccatcaccggaagcattgaaacggctgtttacggcgaggaaaccgtagtaaatgttggacagcgtagccggtgcaaacacatacgcttcttgctgagtacgtgagttcaccacgcggaattcggtgttatcgaacaccactgcgccgcgaccagaaacgatatccacatccccttcaatgtagctgttggtcaccagcgtacgcggctgacgattcgtttccagacggttctgcacaccgctgttggtgacaaagaaggtgttctgacgaccgagaatgttaacgttgttaatctgtacctggtcaccgtcagtacgcagtgccaccgccggatggttacccgcatctacgctatcacccagcgtgttttcgatggtcaggttttgcagttgcaggccattgttttgtgaccagaagaccgcagaacacagaacaccgatactgtcgctgcgtttgctctggcagctatcgtacatataccacgctggtttacctggcatatatttgccgcgcgggttgacgtcgtgacgccagtcggcagggctcatgcccccatcaagggaaagcccaatcttcacatcaatcggtttttcacctgtaccgtacagagtaattccacctggagcagcagggacatacaccgttccctgatactcaccaggcatcacggcaatatactggcgcttgttggtgcgcttgataattgccgcatctaccgccgcctgaatcgtggtatgcgttacaccttgagtacccgccgggccgacaacaaagtcaggttgcgcaggcagggttatcggggacggattccacgctgcagcacctggtgtcagggatgcaaaatagtgttgagcatcgaaattctgcgcttcttttgccgacagaatcgggcgagaagaggtaccaggcgcagtttgatcagaaggacgttgatcgggtggtgttgagctacangcggtcagcgtcacgccaaaagccaatgccagcgccagacgggaaactgaaaatgtgttcacaggttgctccgggctatgaaatagaaaaatgaatccgttgaagtctgcttttttatactaagttggcattataaaaaagcattgcttatcaatttgttgcaacgaacaggtcactatcagtcaaaataaaatcattatttgatttcaattttgtcccactccctgcctctgtcatcacgatactgtgatgccatggtgtccgacttatgcccgagaagatgttgagcaaacttatcgcttatctgcttctcatagagtcttgcagacaaactgcgcaactcgtgaaaggtaggcggatccccttcgaaggaaagacctgatgcttttcgtgcgcgcataaaataccttgatactgtgccggatgaaagcggttcacgacgagtagatgcaattatggtttctccgccaagaatctctttgcatttatcaagtgtttccttcattgatatcccgagagcatcaacatgcaatgttgtagggatggcaatttttacgcctgttttgctttgttcgacataaagatatccatctacgatatcagaccacttcatttcgcataaatcaccaactcgctgcccggtaacaacagccagttccattgcaagtctgagccaacatggtgatgattctgctgcttgataaattttcaggtattcgtcagccgtaagtcttgatctccttacctctgattttgctgcgcgagtggcagcgaccgggtttgttgttatatggccttcagctattgcctctcggaatgcatcgctcagtgttgatctgattaacttggctgacgccgccttgccctcgtctatgtatccattgagcattgccgcaatttcttttgtggtgatgtcttcaagtggagcatcaggcagccccctccttattgctttaattttgctcatgtaatttatnnnntgtcttctgcttgattcctctgctggcgaggattttttcgtagcgatcaagccatgaatgtaacgtaacagaattatcactgttgattctcgctgtcagaggcttgtgtttgtgtcctgaaaataactcaatattggcctgtattgcttcagtgattgctatcctcctgtctcggcctaaaccaaactctttacccgtccttgggtccctgtagcagtaatattgtttnttatataaaggttagggggtaaatcccggcgctcatgacttcgccttcttcccatttctgatcctcttcaaaaggctacctgttactggtcgatttaagtcaacctttaccgctgattcgtggaacagatactctcttccatccttaaccggaggagggaatatcctgcattcgcgcacccatcgacgaactgtttcaaggcttcttgggcgtcgctggcgtgcgttccactcctgaagtgtcaagtacatcgcaaagtctccgcaattacacgcaagaaaaagccgccatcaggcggcttggtgttctttcagttcttcaattcgaatattggttatgtctgcatgtgctatctgcgcccatatcatccagtggtcatagcagtcattgatgttctctgcttcgataactctgttgaatggttctccattccattcacctgtgactcggaagtgcatttatcatctccataaaacaaaacccgccgtagcgagttcagataaaagaaatcctcgtcagtgcgaggatgctgttcattgctgctatacacttttttgctctcaacgtaagcggtagctcattctgttgggttggtgcagttgcttttaggaaatgctatttaccccttaaacgtcggctgaaagagctaaaatccatgcaaaaaatttacgcaattttgtgtattattgtgcagtaagtaatgagctattttctgcgcaaaaannggatggtaaatttgtccggggcaggaannnnnnnannggcgctaaacatgaaaaaagattcgtatccttatttgatttgcatgacagtttnaggcctgatctttattttccttttcttctggtggcgggcagatatttacagggtcacgtttcttaatcagagtatatcccactattacattctgtttagcatgggaatagcttttctgttatctctgttttgggttaagaaggggatagtaaaacaaagcggctggaagagtctgtcagcataccttaaggtttatgcagggatgtgcatatttgctggattttttctgattataccccttacaacactaacttattttttgcctggagagacatcgtcttatgttgcaccgtatcggtatacttccggtagttcaaaaagttgttctggagctgaggtggatgaccccgatctacatgagaatattcgcatttgctatccgtatggcaattatgagtacgataatattatctatgttgaaaagaaaattaatacattaggtgcggtagtaacatatgcacagaccgcgcgtgatgatactgaatgagatagtatatagcgggcaagttttagttaatttatcgaggtaatataatttacctcgactcgtttattctggtattaatatttcgctttacgatcgatttttatctgatgatatcatgcggttttcatatactgacttactgtcttttctccgttagcgattttctcctgctcagcgatgattttatctttggcttctagttaatttcgctcacttcgaacctctctgtttactgataagttccagatcctcctggcaacttgcacaagtccgacaaccctgaacggccagacgtcttagttcatctatcggatcgccacactcacaacaatgagtggcagatatagcctggtggttcaggcggtgcatttttattgctgtgttgcgctgtaattcttcaatttctgatgctgaatcaatgatgtctnccatcttccattaatccctgaattgttggttaatacgcttgagagtgaatgcgaataataaaaaaggagcctgtagctccctgatgattttgcttttcatgttcaccgttccttaaagacgccgtttaacataccgattgccagacttaagtgagtcggtgtgaatcccatcagcgttaccgtttcgcggtgcttcttcagtacgctacggcaaatgtcatcgacgtttttatccggaaactgctgtctggcttttttgatttcagaattagcctgacgggcaatactgcgaagggcgttttcttgctgaggtgtcattgaacaagtcccatgtcggcaagcataagcacacagaatatgaagcccgctgccagaaaaatgcattcagtggttgtcataccaggtctctctcatctgcttctgctttcgccaccatcatttccagcttttgcgaaagggatgtggctaacgtatgaaattcttcgtctgtttctactggtattggcacaaacctgactccaatttgagcaaggctatgtgccatctcaatactcgttcttaactcaacaggagatgctttgtgcatatcgcctcccgtttattatttatctcctcagccagccgctgggctttcagcggatttcggataacagaaaggccgggaaatacccagcctcgcttcgtaacggagtagacgaaagtgatcgtgcctacgcggatattatcgtgaggatgcttcatcgccattgctccccaaatacaaaaccaatttcagccagtgcctcgtccattttttcgatgaactccggcaccatctcgtcaaaacccgccatgtacttttcatcccgctcaaccacgacataatgcaggccttcacgcttcatacgcgggtcatagttggcaaagtaccaggcatcttttcgcgtcacccacatgctgtactgcacctgggccatgtaagccgactttatggcctcgaaaccaccgagcctgaacttcatgaaatcccgggaggtaaacgggcatttcagctcaaggccgttgccgtcactgcataaaccatcgggagagcaggcggtgcgcatactttcgtcgcgatagatgatcggggattcagtaacattcacgccggaagtgaattcaaacagggttctggcgtcgttctcgtactgttttccccaggccagcgccttagcattaacttccggagccacaccggtgcaaacctcagccagcagggtgtggaagtaggacattttcatgtcaggccacttctttcctgagcggggctttgctatcacgttgtgaacttctgaagcggtgatgacgccgagccgtaatttgtgccatgcatcatccccctgttcgacagctctcacgtcgatcccggtacgctgcaggataatgtccggtgtcatgctgccaccttctgctcagtggctttctgtttcaggaatccaagagctttcactgcttcggcctgtgtcagttctgacgatgcgcgaatgtcgcggcgaaatatctgggaacagagcggcaataagtcgtcatcccatgttttatccagggcgattagcagagtgttaatctcctgcatggtttcatcgttaaccggagtgatgtcgcgttccggctggcgttctgcagtgtatgcagtattttcgacaatgcncnnnnnnnnnnnntccttgtcatagataccagcaaatccgaaggccagacgggcacactgaatcatagctttatgccgtaacatccgtttaggatgcgactgccacggccccgtgatttctctgccttcgcgggttttgaatggttcgcggcggcattcatccatccattcggtaacgcagatcggatgattacggtccttgcggtaaatccggcatgtncaggattcattgtcctgctcaaagtccatgccatcaaactgctggttttcattgatgatgcgggaccagccatcaacgcccaccaccggaacgatnncgttctgcttatcagggaaggcgtaaatttctttcgtccacggattaaggccgtactggttggcgacgatcaacaatgtgatgaactgcgcatcgcnngcnnnnnngcgcgatggggagacagggcggcatgagacgacagcgacgaagtttcaccgacatcatctgcgaaaactgcaaataccttccaacgaaacgctccagaaataaacgcaagccaatcccaaaagaatctgacgtaaaaaccttcaactacacggctcacctgtgggatatccggtggctaagacattgtgcgaggaaaacaaggtgattgaccaaaatcgaagttacgaacaagaaagcgtcgagcgagctttaacgtgcgctaactgcggtcagaagctgcatgtgctggaagttcacgtgtgtgagcactgctgcgcagagctgatgagcgattcgaatagctcgatgcacgaggaagaagatgatggctaaaccagcgcgaagacgatgtaaaaacgatgaatgtcgggaatggtttcaccctgcattcgctaatcagtggtggtgctctccagagtgtggaaccaagatagcactcgaacgacgaagcaaagaacgcgaaaaagcggaaaaggcagaaaaggcagcagagaagaaacgacgacgagaggagcagaaacagaaagataaacttaagattcaaaaactcgccttaaagccccgcagttactggattaaacaagcccaacaagccgtaaacgccttcatcagagaaagagaccgcgacttaccatgtatctcgtgcggaacgctcacgtctgctcagtgggatgccggacattaccggacaactgctgcggcacctcaactccgatttgatgaacgcaatattcacaagcaatgcgtggtgtgcaaccagcacaaaagcggaaatctcgttccgtatcgcgtcgaactgattagccgcatcgggcaggaagcagtagaggaaatcgaatcaaaccataaccgctatcgctggactgtcgaagagtgcagggccatcaaggcggagtatcaacagaaacttaaaaaactgcgaaacagcagaagtgaggttgcatgaatatctacgaaagaattgatggcagcaaataccganntatttgggtagttggcgatcnnnnggatgctacacgaacctgatgaaaaaactggagacgataggattcgacaccaaaaaagacctgcttatcnnnntggcgatttggttgatcgnnnnnagagaacgtagaatgcctggaattaatcacattcccctggttcagagctgtacgtggaaaccatgagcaaatgatgattgatggcttntcagagcgtggaaacgtcaatcactggctgcttaatggcggtggctggttctttaatctcgattacgacaaagaaattctggctaaagctcttgcccataaagcagatgaacttccgttaatcatcgaactggtgagtaaaggaaaaaaatatgtcatctgccacgccgattatccttgtgataaatacgagtttggaaagccagttgatcatcagcaggtaatctggaaccgcgaacgaatcagcaactcacaagacgggatcgtgaaagaaatcaaaggcgcggacacgttcatctttggtcatacgccagcagtgaaaccactcaaatttgccaaccagatgtatatcgatactggcgcagtgttctgcggaaacctcacattgattcaggtacagggagaaggcgcatgagactcgaaagcgtagctaaatttcattcgccaaaaagcccgatgatgagcgactcactactggccacagtttattggttttcgtaactgagtcattttattattttattgcaacttttaatcttttatagtgcgaaataaatggagctggcattcatttcgcactttatgtttttgttggacttatgttattttgattgaatnnnnntcagttaaaaaaagaaggtgattnnnnnnnttntaaatgaatagtcatcccctgtcttgaattctgatgttactttattaaatgctagtgtgaaggctacaggtgcatacccaattgttgcgccaacttgatattcatcaacagttttgtttagcgatactgttgtttgtttcgtctgtattgtttttccttcgagagtatagttgcgattgacatctcgtctttccatacctgcaaaaatcttgtatttgaatccgcttgtatcggacatatgcattaaaccacggggagccagcagaccaaagccattatccgaattgaaggttttatcattaccaatggcaatggttgcgccatatgctacatattgaaataagtttccagtaacagcagaaacttcagggtataatccaacattagcacctaaaatatccatacttggtgtcatggatagcatcccttttacagtataaccgtagcgattctctatttgatcatcccatgcatgatatttttctgccccaataatctcatgagctttattttgtactttctgaccgcctgcgtcggggccaacaacacctatgtcagtacctaatcgatagcgaatccagtcattcgcaagggagttccattcaataccagtgtgagtgtatgcactaaaagctctgtctccagttacagctgtgttgtgtcttttattactgcctgatggagagtaaatatcttgcgcaatatggagagataattggctcgagtctgagatatcgtggctatatcccagaaataagccttgtgagtaatcatctctgtttttatgtttattgccataaatatcattaagtattggttgaaacttccctgcatcatcatttgctaatgataatgcaaggctgttcgcgatagctgaacacgtggtaaatgacagagcaataaagacgccagcgatgacactttttttcatatgttattgtcttccttttttttgaatggtgcgcgtattttacatacatgagtttgtaatacaaggtgcgtaatcaatatgatgttttataattgcgtgagacaattgatttattcgttttttattgcnnnntttattatcttttaatgtaacggtgtttttattaagtgtgtttgcgtggtgttttatgttttttataattnnnnnnnnnnnnatttaaatgcattagtaatggctattctatatagcaatataagaactgttacaaaaaaanggggggcaattacaggtagttatggatgatgagtgaaacagatattggagaaccggggaatgaatgatgtctgagtcttatatatcagaactccttcgctgtcgctgggggctcctgtgcttatgtcgtttccccgattcggttttgaacgattaccgaatgttgaagaattatgccaaaatatagaaaggatttactgcatgaatacccaatatttacagtatgttcgtgagcaacttatggcagctactgctgacttgaacggagcaacgaaaggccagctcgaagcctggcaggagcatgcacaatttgatactggtacatacaaacgaaagaagccgcgcattctggatgtggtaactggcaagatgattacgctggataatacgccgacttccggtaagcagtcgtacgcaaaaggttcatccattgctttggtcagcccggttgaattctcaacctcttcatggcgccgcgcggttttgtctctcgatgaacatcagaaagcatggttgctttggtgttacagcgaaagcgttcgatgggggcatcaggtcaccataacgcaatgggcatggagcgagtttaaagatttgttaagtaacagaaaaattgcaggtaagacactggatcgcctgaagacgttaatctggctggctgcacaggatgtgaagagcgaacttgcagggcgtgaggcctatgaataccagacactggcatcattggtgggagtgacaacaaaaaactggtccgagacatttactgaacgctgggttgcaatgaagcacatttttctacagcttgatagtgatgctttattgcttgtgacgagaacacgttcaaaacaaaaggcagcatttttacagcaaaatattgcaaaactggattaaaagccatatacttcatgcaaatttggtatgttgtaaaaaatnnnntaaacccgctgccgagtgggtttttttatgccctgagttgtacttgtacggtaaacatgctggctgctatgtaatagagtttttttagcctgtaacctcttgacggcattgaattgcttttgttatgagttgtaagccaatgttatcatcttgtattggggtggttatgaaggatggtgcgctgctcaggagttcttcactttttattgcctacatgggatgccttggatgggggagtgcttatttctatggatggggtacttctttttactacggcttcccatggtggattgtaggtgcaggtgttgatgatgttgccagaagtttattttttgcagttatcgtcattgctatatttcttatcggttggggtattggtgttgtattctttttcgcagtgaaaagaaaacattctatgcaagagctaaatgtatttcgcctttattttgctgtggaattattgtttgtgccggcaattattgagttttctatattgagacagaagattcaggtacctcttttgctactgtcagcagcgattgcgctggcggttacaatttcgataagatcttatgggcgatttttatcggtatcatgcttctatgataagccatttataaaaaaacatttttttgagattgtgatgattgcttttgtggcatatttctggcttttttcatttctgacaggatattacaaaccacagtttaagaaagaatatgaaatgattaattataatgatggttggtattatgttcttgctcgttatgataattgtctggttttgtctacttctttcaatgcaggtagtaaaaggtttgtcatttatcaatcagcacaagataagaatcttcaggttgatattgtaaggaccagaatttaattggctgcataaataatattttaagttgcaagttggctattcgtaggaatagaaccttaggcatgctgaatgcgtttcctgaacattgttttataaactgtgtctgcttgctgttgtgatcctgcttttagtgatggtgatgatggatttcaccagcaggataatgttggtactgactgatggcgctctggtctgcggcattgtggtattgctgtggccgatgatgaaagaacagaatgaataattcttgacttttttgtttactgtttattaaaaaatcaaccgcatggtgaatcctccttggaggggctaaatgatcgagttttaagggcacgtagcgagttctgtttgatcattgcagaacttagcgggaggcgccatgcgtacatcactaatgttatttccttctatcattttccttgtgagttctggctgcgcatggcgcggccttttttttatgacctgccactggcagatggtcatcctgtgatttgattccggttccggctttttaactctgttcctgtacacgggagaaattctatgtcgattaatcgttatgatattggttacaagaagtaccacgtattgtgttgagatagaaagcatggtgccagaggtaaatgcagcagcataataaaaaagagccagcgcagaagagaacgggtaaaagagtctgcgctggcgtggggatattccccgtggagaaatgatatgtaacacacatcgggaacctttctatataaacattatcattattgtcaatcataacagtcaggtattatgacgtttatgcatcagggccatcaggaattaactggtggctttttattgttgtcagcttccggataacgggagacggggtatgtaccagatggaaaaaataacaacaggtgtgtcatacaccacgtcagcggtggggacgggatactggctactgcagttgctggacaaagtctccccatcccagtgggtggcaataggcgtattgggtagcttggtgtttggcttgctgacgtatctgacaaacctttatttcaagattaaagaagataagcgtaaggctgcgagaggtgaataatgtcgccatcattacgcaaggctgttgctgctgctattggtggtggggctgttgccatagcgtctgtgctcatcactggtccgagtggtgacgatggcctggaaggtgtcagctacataccatacgaagatatcgttggcgtatggactgtatgtcacggacacaccggaaaagacatcatncccggtaaaacgtataccgaagcagaatgcaaagccctcctgaataaagaccttgccacggtcgccagacaaattaacccgtacatcaaagtcgatataccggaaacaacgcgcggcgctctttactcgttcgtttacaacgtgggcgctggtaatttcagaacatcgacgcttcttcgcaaaataaaccagggtgatatcaaaggcgcatgtgatcagctacggcgctggacatacgctggcggtaagcaatggaaagggctgatgactcgccgcgagattgagcgtgaagtctgtttgtgggggcaacaatgagcagagtaaccgcgattatctccgctctggttatctgcatcatcgtctgcctgtcatgggcggttaatcattaccgtgataacgccatcgcctataaagaacagcgtgataaaaaagtcagtgagctgaagcaggcgaccgccaccattactgacatgcagcagcgccagcgtgctgctgatgcactcgatgctaaatacacnaaggagttagctgatgcgaaagctaaaaatgatgctcttcggcgcaagcttgataatggtggtcgggtgttcgtcaaaggaaaatgccctgtgccatcctcagacgaaacctccagcgcctccggcatgggcaatgatgccaccgtcgaactctctccagttgctggacgaaacgttctcggtatccgggacggaattatccgcgaccaaacagcactgagaacgcttcaggaatacatcaggacgcaatgccttcgatgatagcgataattntactcatcatccttcacatctggctctgtagacagggtggtgctcacttctggagtgaatcatggttaaacatctcattgctgatgcttgatattgagcatctggcgcgcggtaaggggctgcgttgagataagagccagtcattaaaaatacctggatttagcctcgcattcgcggggcttttttattgccattacaaaagccactccctacagagtggctttgataatggcttataccctacacgggataacttaactgatatcccttttaacggataaaggtattcaagcctgacacatcatgcgctgtatcgtcgctgtattcccgcattaaccatgaccgtagcccgacggggaactccttctgcncgagtgtgcgggaataatcaaaaacgatgcacaccgggtttttaccgcgctaatgattcgcgggtttgtccctcatgctcgccagtcctgtgngggggtggaagaaacaggacactcacacagattcttgtgggtcgatgctattcctttctggattatcccgatgccattcatgcaaaggctgtatcagacgttcgtcatggctttcaggctgacggctcctcccggtggggtggcctgccacggggcgggagcgtcgcggaaaaaggctagtttttgcatttttatcggccaccatcatctttgcatcttattgattattaatggttatttgttttttgtatgtcgaattgagtgttttttgttcgacatcgaacgcgttttcttaaagttgttcgcacgatgcatgtttaaagctctccggaggaaatatggatcatgagttgaaaaacctggtgctgaatattaatcaactggcggctttatctggtctgcaccgccagactgtcgtggcaagactgaaaaacattcgtcccgctggtggacatgacaaactcaagctataccggttgaccgatattctgactgaatttatggggttaccaccgccggttgctgagggcgaaatggatccacatgaacgcaaagcctggtatcagtctgaacgtgagcgtcttaagttcgaacaggaaacggcacaactcattccggccagtgatgtcagacgggagtttgccatctgggcaaaagcggtcgtgcaggtgctggagacattaccggatattctggaacgtgactgtggtctgcagcctgccgctgtgagccgtgttcagtccattattgatgatctgcgcgatcagatagccctgcgggtgaccgaagcaggtgcggatgatgaggaggaattacagcaggaggagtaatgctgaatcaggaaaccgcaaaggcagcacgaaccgattcaggttatatccttcgcgcaccgagacgaatgcgggttgctgatgccgttgctcagtatatgcgggtgcccatgggggccgggaactcagtcccgtgggatccgctggtggcaccgtatgttattgagccgatgaactgcctggcctcgcgtgaatacgacgcagtgatatttgttggcccggcacgaaccggcaagactatcggcctgattgacggctgggtgatttacaacgtgatttgcgatcctgcggatatgctgatcattcagatgacggaggaaaaagcccgcgaacactccaaaaaacgactcgccagaacgtttcgcgtcagcccggaagtggtcagtcgcctgagtccgaacaaaaatgacaacaacgtttatgacagaacattccttgctggcaactacctgaaaatcggctggccgtcagtcaatatcatgtcctcatcagattataaatgcgtggcgctgacggattatgaccgttttccggaagatattgatggcgagggggatgccttctctcttgcctcaaaacgtaccaccacatttatgtccagtggtatgacgctggtggagagttcccccggcagggatgtgaaggatgtgaaatggcgacggacttcaccgcatgaggctccaccaaccacggggatactgtcgctctataaccgtggcgatcgccgtcgccggtactggccctgtccacactgtggtgagtattttcagccctgcggcgatgtggttgctggtttccgtgatattgccgatcccgtgctggcaagtgaggcggcttatattcagtgtccttcctgttcaggacggattatgcctgaacaaaaacgtgagctgaacggacgtggggtctggttgcgggatggtgaatccatcaatgcggatggtagtcgttatggtgatccccgacgctcacgtattgcgtcattctggatggagggtccggcagctgcttaccagacactctcgcaactcgtttacaaactgcttactgcagaacaggaatacgagacaaccggaagtgaagaaacactcaagacggttatcaataccgactggggattaccttatcttccccgcgccagcatggagcaacgaaaaagtgaactgcttgagcagcgggcagagccagttccttccagcagtgtgccggatggcgttaatttccttgtggcgacagtggatgtgcaggcgggacgtcatcgccgttttgtggttcaggtaacgggctatggcagccgtggcgaacgctggattattgatcgttacaacatcacgcagtcattgcgcggtgacagcgacggtgagagccagcgaattgatccggccagctatccggaagactgggatgtcctgctgacggatgtttttcataaaagctggccgctggcctccgatccttctcaacaaatgcgactgatggcaatggcggtggactccggcggtgaagacggggtcactgataatgcctataaattctggcgtcgttgccgtcgtgatggccttggtaaacgtatttacctgtttaagggcgacagcatccggcgcgcaaaactgatcacccgtacattccctgataacaccggacgaacgggccgacgggcgcaggccgcaggtgatgtgccgctctggcttcttcagacggatgcactgaaagaccgggtgaataacgcgttatggcgtgactctccaggtcccggctatgtgcatttccctgactggctggggagctggttttacgacgaactgacgtatgaagagcggagtagtgacgggaaatggagtaagccgggtcgcggtgccaacgaagcttttgacctgatggtgtatgccgaggctctggtcattctgcatggatacgaaaagatccgctggccggatgcaccggggtgggcgagccgggaaacctggctggagagtgtcccggacagtaccgaaccgtcaccctcaccggaaccggtatccacgcctgttaaaaaacaaaaacggaagaaaacagtaactgacgatgttaacccctggctgacttccggaggatggttatgaaccagaatgatatcgaagccatgattcagcgttatacggaagctgaaatggcggtgctggacggaaaatccgtcacctttaatggtcagcagatgaccatggaaaacttatctgagatccggcagggacggcaggagtgggagcgccgccttgcggctctgattacacgacgacgggggcatcccgggtaccggctggcgaggttctgatggcaattcttgatgatgtgattggcgttttttcaccaggatggaaagcggcaaggctgcgttcccgtgcggtgatccaggcttatgaggccgtaaaaacgacgcggacacacaaagcccggcgggaaaaccgaactgccgaccagttaagccagtacggggccgtgtcgttacgtgagcaggcccgttaccttgataacaaccacgatctggttattggtgtatttgacaagctggaagaacgggtggtggggaaaaacgggattattgtcgagccacatccggtattacgcaatggggccattgcccgtgatctggcagcggagatacgcacccgatggagtgaatggtctgtcagtccggaagtcaccgggcagtttacccgtccgatgctggaacgtctgatgctgcgtacctggctgcgcgatggtgaggtgtttgcccagatggtttccgggcgcataaacagcctgacgccttctgccggtgttcatttctggctggaggcgctcgagccagactttattcccatgaccagtgatgagagcaacaggctgaatcagggcgtgtttgttgatgactgggggcgtcccgaaaaatatctggtgtataaaagccgtcccgtatccggacggcagatggaaaccaaagaagtggatgcagagcgaatgctgcatcttaaatttgttcgccgtctgcaccagatgcgcgggacgtctttgttgtccggtgtgctgatccgcctcagtgccctgaaagagtatgaggattctgagctgactgcagcaaggatcgccgctgctctggggatgtacatccggaaaggcgatgggcagagctatgaaccggatggtaatggcagcaaggataaggaacgcgagcttaccattcagccaggcattatttacgacgatctgaaacccggcgaagaaatcggaatggtgaagtcggatcgccccaatcctaaccttgaaacttttcgtaatggtcagttgcgtggcgtggcggcgggcagtcgtctgagttttttccagtacagcgcgcaactataacggcacttacagcgcccagcgtcaggagctggttgaatccactgatggctacctgatcctgcaggactggtttattggtgccgtcacccgcccgatgtatcgtgcctggctgaaacaggctgtggcatccggtgttatcaggctaccccgcgatcttgaccgttcttcactgtataccgcggtgtattccggaccggtgatgccgtggattgaccctgttaaggaggctgaggcctggaaaattcagattcgtggtggagcagcgacagaatcagactgggtacgtgcaggtggtcgtaatccggatgatgtcaaacgtcggcgcaaggccgaaattgatgaaaaccgcaagctggatctggtatttgataccgatccggccagtgataaaggaggcagcagtgccgcaacgaaacgacaggagccgcagcacaccgacgaccagtccgaagaataattcctggttcaggatgcaggctggtcaccagagtgacgcggatatttatatttatgacgagattggtttctggggtgttacagcgaagcagtttatcagtgatctgaatgcactgggcgatatcacccacattaatctccatatcaattcaccgggtggcgatgtctttgaaggcatcgccatttttaatgcactgaaaacacatggtgcgtccattaccgtttatgtcgacggtgtggcggcgtcaatggcgtcggtcattgcgatggtgggaaaaccggtcattatgccggaaaactccttcatgatgattcataaaccatttggctttacgggcggtgatgcggaggacatgcgcacctatgccgacctgctcgataaagttgaggcggttctgttacccgcttatgcacagaaaaccgggaaaaccaccgatgaaattgctgccatgctggcggatgagacctggatgtccggtgccgaatgtctggcacatggatttgctgatcaggtgacgccagccgttaaggcaatggcatgtattcagtcaaaacgtacagaggaatttaaaaagatgccggaatccattcgaaacatgattactccgccacgcaacagtgctccacgcgtacaggatgatggacctgcagcctcccggacgccagtgcaggcagcagcacctgtggtggatgaaaacagtatccgtgcgcaggtactggcagagcaaaaagcgcgtgtaaacggtattaatgatctgtttgccatgtttggcgggcgttatcagacgctgcaggctcagtgtcttgccgatcctgaatgttcgctggagcaggcccgcgaaaagctgttgaacgagatggngcgcgagtccacgccatctaataaaaataccccggntcatatttatgccggaaacggtaattttgtgggggatgggatccgctaggcgctgatggcgcgtgccggatttgaaaaaaccgaacgtgataatgtctacaacgggatgaccctgcgtgaatatgcccgtatgtcactgactgaacggggtattggggtttccagttataacccgatgcagatggtcggtgcggcgttcacacacagtacgtctgacttcggtaatattctgctggatgttgcgaacaaagccattctgcagggctgggaagatgcccctgaaacctatgaacagtggacgcggaaaggtcagttgtctgattttaaaattgcccatcgtgtgggtatggggggcttcagtgctctgcgtcaggtgcgtgaaggggcggaatataaatacgtcaccaccggagataaacaggccactattgcactggcgacctatggcgagctgttcagtatcacccgtcaggccattatcaatgatgatctgaatatgctgaccgatgtcccgatgaaactgggccgtgcggcgaaatccactattgccgatctggtttatgccattctgacgtctaacccgaaaatctccacagataatgtaagtctgttcgataaagcgaaacatgcaaacgtactggagagcgctgcaatggacgtggcatcgctggataaagcccgccagttgatgcgcgttcagaaagagggggagcgtcatctgaatattcgtcctgcgttcgtactggtaccgacggcgatggagtctgttgctaacaaggtcattcgctcctcaagtgtcaagggggctgacattaacgccggtattattaacccggtgaaagattttgcgaccgttattgcagagcctcgtcttgatgataacagccagaccaccttctacctggctgcgtcaaaaggctccgatacgattgaagtggcttatctcaacggtgtggatacgccatatattgatcagatggagggcttcagtgtggatggcgtgacaacgaaagtgcgtattgacgccggtgtcgcgccagttgatcaccgcggtctggtgaaatgtacggcgtaaacgtcgcagacaacaactctgatggcccgtaagggctttttttgtacctgaaatcagcccctgaacggggctgtgcggagacagttatggcaaagaattttgtagaagaaggaaaaacggtggcgattgttgccagtgcagccatcagcagcggagatctggtgcaggtgggcgatgtttttgcggtggcgctgaccgatattccacagggtgaaacaggcgacggcatgaccgaaggtgtgtttatgctgcctaagctgaaaacggatgacatgaaaacgggtaagaaggtttatctgaagtcaggaaaagttcagctgactaacagcggctctgatccgctggtcggggttgtctgggcagatgccggaaccagtgcagaagaagtgccggtaaaactcaatgtctgatcccttttcccggctggcagcgcgtatggatgctatcacggtcagaaagatgggaaagacagcctcgattaatgatgtcgatatgactgtgatcccgggagaaacactggcagagctgaatgctctgtccggacctgcggtctctctggtggtgttttcttcgggataccgcccacggcgcggggatcgcgttgtttatgacggacaacaatggacggtcacacggcatgaacgctttaacggtaagccaatgatctttattgagtaaagaggtgtgggatgaaggggcttgagaatgccatccgcaatctgaacagccttgatacccgtatggtgccacaggccagcgcatgggcgataaaccgtgtggcacanaaagcggtctcggttgccacccggcaggttgccgggaataccgttgcgggagataaccaggtgaaagggatccccctgaaactggttcgtcagcgtgtccgggtgtttaaagccagtccgtcaggaaaaatgacggccaggatccgcgttaaccggggcaatctgcccgccattaagctggggacagcccgggtcagactggcccagcgtggtggaaaactgcagtaccgtggcagtgtgctgaaggtgggtaaatatcttttccgggatgcgtttattcagcaactggcgaatggtcgctggcatgtgatgcggcgtattgatggcaaaaatcgttaccccattgatgtggtgaaaatcccgctgtccggaccgctgacacaggcatttgaagatgcccgcgaccgcatcattgctgcggaaatgccgaaacagctggggtatgcactgaaacaacaactgaggttatggctgacccgatgaaccgacatacacaaatccgccaggtcgtactggcacgccttcgggaacagtgtggagacagcgccacgttttttgacgggcttccggcatttgttgatgcgcaggaactgcctgccgtggcggtgtggctgagtgatgctcagtacaccggaaaaatgacggatgaagatgactggcaggctgttctgcatattgctgtcttcatccgggcacaggcaccggattcagagctggatatgtggatggagagcaccattttcccggccctgaatgatgtatcggcactttccggactcatcgacaccctgatcccactcggttttaactatcaacgtgataatgagatggccacctgggcgatggcggaaatcacgtaccagatcacgtacacgaattaaggaggtggtaatgaccacgccaaatccactggcaaagacgaaaggtgcggggacgacgttctggatgtataccggcaacggcgatgcgtttgcgaaccctttgtcggacactgactggctgcgtcttgcgatggtgaaggatctgcaacctggcgaaatgaccgctgatgcagaagatgacacttatctcgatgatgaagatgcagactggaaaacgacaacccaggggcagaaatccgttggtgatacttcggcgacgctggcctggcgtccgggtgacagcgggcagaaaaaactggttcagttgttcgactccggtgaagtctgcgcgtttcgtatcaaatatcccaacggcactgttgatgttttccgcggctggctgagctcactgggtaaaaccattgcctcaaaagacgtgatgacccgcacagtgaaaatcagcggtgtggggcgtccatatctggcagaggagggcactgaaactgtgggcgttaccgggctgacggtggcaccggcatccgccagtgtcaatgtgggagcaaccaccacgctgacctttacagtaaaacctgacggagccagtgacaaagcgatcagtgtgcattcgacagatccacagacagccactgtgaccctgaacggacttgtggccacggtgaaaggcgtgaagcagggcagcgtcagcattgtgggcatgaccgctgacgggaattttgtggctgtggctgcggtgactgtcagcgctgcaggttaacaggacgatactcatcatttgccccggttatccggggcttttttgcaggtggagaacatgatgtttctgaaacagggcacgtttaattatgaaaagcagtccgtggtgctcagtgagctgtccgggctgcagagaattgaatatctggcgtttgttcagcagcgaacggcaaagtttgatgccgaagagggagaactgccggaggctgaacgacagattgcttttctgcggatggggatggatatcaatgcctggctggtttcccgctcactgtggaatgcggaacagtctcaggatgttgagacgctttgcgcatccgttattacaacatggtcgtatgatgccctgggagcgggggcggagatggttctgtcgctgagcggtatgggagccattgagaatgccggggatttggagcatgaggtgctgacgccggaaaagtcctgacgcgggaaatgcagtttgtcatgcggcttgcccgggagttccggcgggcagactggcggcggatgctgtcggaaatgtcggccactgagcttggtgagtggggcgattatttccggatgcagagcttcagtgatgtgtggatggatgcgcagtttgcctcgctgaaggcattgatcgtgagaatggtgtccggtagcagtgatgctgcggtggctgatttcagccttttaccggaagagaacgggataccggagcgaacggacgaagaactgatgcatcttggggaaggtatttccggaggtgtgcgttatggaccagatagccaacctggtcattgatttggggattgatgcggcagagtttaaaaatgaaattccccgtatcaaaaaccttctgaatggtgcagccagcgatgcagaacggtcttctgcccgtatgcagcgttttatggagcgtcagactcaggccgcccggcagacaatgcaggcggcttcttcggctgcaacagccgcatccgtccatgcgcagacggtggagaagagcgcacaggctcatgaacgcatggcccgcgaggtggagcaaacccgccagcgtatggaggcactgagccagaaaatgcgcgaggaacaggcgcaggccatggctctggcggaggctcaggataaagcggctgctgcgttttatcgtcagattgacagtgtgaaacaggccggtgcggggctgcaggaattacagcgtattcagcaacagatccgacaggccagaaacagtggcgggattggtcagcaggattatctggcgctgatttctgaggttacggcgaaaacccgtgttcttacacaggctgaggaagaggctacccgacagaaagtggcgtttatccgtcagcttaaagagcaggcaacccgccagaatctttcttcttctgagttgcttcgtgctaaggctgcccagctgggggtaagcagtgctgcagaagtgtatatccgcaaaatggagcaggcaggaaaagccacgcattcgctgggtctgaaaagtgcagcagcccgtcaggagataggcgttctgataggtgaactggcccgcggtaatttaggtgcgctgaggggatccggaataacgctggctaaccgtgccgggtggatagacacactgatgtcaccgaaaggcatgatgccaggagcggttattggcggtattgccgcggctgtctatggtctgggtaaagcctggtatgacggtcagaaggagggggaagaatttaaccgccagctgtcgctgacggggcattatgccggagtcactgccgggcagctgtggacgctcagtcgtgctatttccgggaatggtatcacgcaacatgctgcagccggtgcgctggctcaggtggtggggagtggtgcatttcgtggaaacgatatcggtatggtggcgagagctgccgcacagatggagcgatcggttggccagtcggtcagcgataccataaatcagtttaagcggctgaaggatgatcctgtaaatgccgcgaaggctctggacaatgagctgcattttcttactgccactcagcttgagcagatacgcgtccttggggagcaggggcggtccagtgatgctgcacggatagccatgtctgcactggcagaggaaaccggtcggcgtactgcggatattgataataacctcaatgcgcttggcagtacgctgaagtatctgtctgatttgtggagtcgtttctgggatgcggccatgaatattggtcgtgaagactcgctggatgaacagattgccgctttacaggagaaagtgtcgcgggcgaaaagactcccctggacggcatcatcttctcaggttgaatacgatcagcagcgtcttaacgatcttcaggagaaaaaacgccagaaggatttgcaggatgcaaaagagcaggcagagcggaattatcaggagcaacagaaacgccgtaatgctgaaaatgctgcactgaaccggatgaatgaaacggaagcagcacgacatcagcgtgaaatagcgcgtattaatgccatgcagtacgccgatcaggctgtcagggatgcggcgatacaacgtgaaaatgaacgttacgagaaagccctggcatccggtaagaaaaaaacacgcgaaccccgtaatgatgaggccacccggttattgctgcagtacagtcagcaacaggcacaggtggaaggacagattgctgctgccagacagtcagcaggcattgccacggaaaggatgacagaagcgcataaacagcttctggctctgcagcagcgcatcagcgacctggacgggaaaaaactgacggcagatgaaaagagtgtgctggcccgtaaagatgaactgattcaggcactgacgctgctggatgtaaaacagcaggagcttcagaaacagacggcactcaacgagctgaagaaaaaaacaattcagctgaccagtcaactggctgaagaagagcgcgctcagcgtcagcaacatgacctggatatcgccacggtgggtatgggtgatcagcagcgacagcgatatcaggtacaactgagtcttcgccagaaataccagcaacagctggagcagttgaggcgggatagtgagcagaaagggacatataacacggatgactacagaaaggccgagcaggcgctgacggagagcctgaaccgacaactgaatgagaatcgccgttactggcaacagcttgaagttgtacagggtaactggaaaaacggagtcctgcgtgcatttcaggattttaccgtggatgcagataatacggcagaaacagcagaacaggtgttctcgtcagccttcagcaacatgggaaatggcctggcaacttttgtcactaccggcaaactcaatttcaaatccttcacctcttctgtgctgtcagatatggcgaaaatcctggcgcaggcaaccatgatgaaatcgataaaagggattggcagtgtactgggatttgatctcagcagcctttccctgaatgccaatggggggatttatcagtctgctgatttgagtcgttacagtggcacggtggttaaccgtccgacgttttttgcttttgcaaaaggcgcgggtgtgatgggggaagcgggacctgaagccattctgccattgcgtcgtggtgctgacggtaagctgggggttgtggcggatattgggggttcaggtatggcgatgttttccccgcagtacaacatcgagatcaataacgatggcacgaacgggcagataggtccggctgcnctgaaggcggtttatgacctcgggaaaaaagcggcagcggactttatgcaacagcaggcccgtgatggtggtcggttaagtggagcatatcggtaatggagacgtttcactggaaagtgcgcccggatatgaatgtggtatcagagccgaaagtggtgacagtgaagntgggcgatggttatgaacagcgtcgtgcggcgggactgaataaccagttgtcgacttacagcgtgacgatacgtgttcgtaaatgtgaacacccatctttaaaagcctttctggaacggcacggtggcgtccgtgcatttcagtggacgccaccttatgactggaaaccgatcagggtggtttgtcgtaaatggtcggcaagcgtgggggcgctgtgggtaaccataacggcagattttgaacaggtcgtggcataggaggctctgatgcaggatattccacaggaaacacatcatgagacgacacgcctcantcagtcagcccaggcggtgctctgggaaatcganctgacagaggtcggtggngaacgttattttttntntaatgagcagaacgaaaaaggtgagccggtnacctggcaggggnggcagtatcaggcataccccattcaggggacgggatttgaactgaatggcaagggcagtgctgcccgtccgacactgacggtttctaacctgcacggcatggtcacggggatggnggaagacctgcagagtctggtcggcggaacggtggtcaggcgtaaggtttacgcccgttttctggatgcggtgaacttcgtcaacggaaacagcgacgccgatccggagcaggaggtgatcagccgctggcgcatcgagcagtgcagcgaactgagngcggtnagtgcctcttttgtactgtccacgccnacggaaacggatggcgctgtttttccgggacgnatcatgctggccaacacctgcacctggacctatcgcggngatgagtgcggttatcacggtccggcngtcgcggatgaatatgaccagccgacgtccgatatcacgaaggataaatgcagcaaatgcctgagtggctgtaagtttcgcaataacstcggcaactttggcggcttcctttccattaacaaactttcgcagtaaatccnatgacanagacagaatcagcgattctggcgcacgcccgncgatgtgcgccagcggagtcgtgcggcttcgtrgtgagaacgccggarggggaaagatattttccctgcgtgaatatctccggtgagccggaggngtatttccggatgtcgccggagkactggytgcgkgcnnnnntgcagggtgagattgtggcgctggtccacagycaycccggtggtctgccctggctgagtgaggctgaccggcggctgcaggtgcagagtgatttgccgtggtggctggtctgccgggggrcgattcanaagttccgctgtgtgccgcatcttaccgggcggcgctttgagcacggggtgacggactgttacacgctgttccgggatgcttaccatctggcggggattgagatgccggattttcancgcgaggatgactggtggcgtaacggtcagaatctctatctggataatctggaggccacagggctgtatcaggtgccgttgtcagcggcgcagccgggcgatgtrctgctgtgctgttttggttcatcggtgccgaatcaygccgcaatttactgcggngacggcgagctgctgcaccatattcctgaacaactgagyaaacgagagaggtacaccgacaaatggcagcgacgcacacactccctctggcgtcaccgggcatggcacgcatctgcctttacggggatttacaacgatttggccgccgcatcgaccttcgtgtaaaaacgggggccgaagctatccgtgcgctggccacacagatcccggcgtttcgtcagaarctgagcgacggctggtatcaggtacggattgccgggcgtgatacaggygaaaatgaattatnnnnncgtcttaatgagccgctggcaaatggtgcagtgatccacatcgtgccgcgcctggcgggtgccaaaagtggcggtgtgtttcaggcagtgctgggtgcggcgctgattgcggtggcatggtggaaccctgtgggctggctgggggccgcggctgtatcgggtatgtatgcagcaggggccagtatgatcctgggtggtgtggcgcagatgctggcaccgaaagccagaactccccgtacacagacaacggataacggyaaancaraacacctatttctcctcactggataayatggttgcccagggcaatgttctgcccngttctgtacggtgaaatgcgcgtgggrtcacgtgtngtytctcaggagatcagcacggcagacgarggggacggtggtcaggttgtggtgattggtcgytgatgnaaaatgttttatgtgaaaccgcctcmgggcggttttgtcgtttntggagcrtgasgaatgggtaaaggcagcagtaaggggcataccccgcgcgaagcgaaggacaacctgaaatcatcccagatgctgagcgtgatagacgccatcagcgaaggaccgattgaaggtccggtggatggattaaaaagygtgctgctgaacagtacgccagtgctggacagtgaggggaataccaayatctccggtgtcacggtggtrttccgtgccggtgagcaggagcagacaccgccggagggrtttgaatcctctggttcagaaacggtgctggggacggaagtgaaatatgacacaccgatcaccaggaccatcacgtcggcaaacatcgatcgtctgcgctttactttcggtgtgcaggcactgcgggaaaccacctcaaagggggaccggnatccgtcggaagtccgcctgctggttcagatacagcgtaatggtggctgggtgacggaaaaagacatcaccattaagggcaaaaccacgtcgcagtatctggcctcggtggtggtggataacctgccgccgcgcccgtttaatatccggatgcgcaggatgacgccggacagcaccacagaccagctgcagaacaaaacgctctggtcgtcatacaccgaannnnnnnnnnnnnngaaacagtgctaccngaacacggcactggttggcgtgcaggtggactcggagcagtttggcagtcagcaggtgagccgtaattatcatcttcgcgggcgcattctgcaggtgccgtcaaactatgatccggaaaaacgcacttacagcggcatctgggacggaacgttaaaaccggcatacagcaacaacatggcctggtgtctgtggnatatgctgacccacccgcgctacggcatggggaaacgtcttggtncggcggatgtggataaatgggcgctgtatgtcatcggccagtactgcgaccagtcagtaccggacggttttggcggcacggagccgcgcatcacctgnaatgcgtacctgaccacgcagcgcaaggcgtgggatgtgctcagtgatttctgctcggcgatgcgctgtatgccggtatggaacgggcagacgctgacgttcgtgcaggaccggccgtcggataaggtgtggacctataaccgcagtaatgtggtgatgccggatgatggngcgccgttccgctacagcttcagcgccctgaaagaccgccataatgccgttgaggtgaactggactgacccgganaacggctgggagacggcaacagagcttgtggaggacacgcaggccattgcccgttacggtcgtaacgtcacgaagatggatgcctttggctgtaccagtcgggggcaggcacaccgtgccgggctgtggctgattaaaacggaactgctggaaacgcagaccgtggacttcagcgtgggngcagaagggcttcgccatgtaccgggcgatgtcattgaaatctgtgatgatgactatgcggggatcagcatcggtgggcgtgtgctggcggtgaacagccagacccggacgctgacgctcgaccgtgaaatcacgctgccatcctccggcaccacgctgataagcctggttgacggaagtggcaatccggtcagcgtggaggttcagtccgtcaccgacggcgtgaaggtaaaagtgagccgggttcctgacggtgttgctgaatacagcgtgtgggggctgaagctgccgacgctgcgccagcgcctgttccgctgcgtgagtatccgtgagaacgacgacggcacgtatgccatcactgccgtgcagcatgtgccggagaaagagggcatcgtggataacggggcgcactttgacggtgaccagagcagcacggtgaatggtgtcacgccgccagcggtgcagcacctgaccgccgaagtctccgcagacagcggggaatatcaggtgctggcgcgatgggacacgccgaaggtggtgaagggtgtgagcttcctgcttcgcctgaccgtggcagcggatgacggcagtgagcggctggtcagcacggcccggacgacggaaaccacataccgcttcacgcagctggcgctggggaactacaggctgacagtccgggcggtaaatgcgtggggacagcagggcgatccggcntcggtatcgttccggattgccgcaccggcagcgccgtcacagattgagctgacaccgggctattttcagataaccgcnacgccgcatcttgcggtttatgatccgacggtacagtttgagttctggttctcggaaacgcggattgcggatatcaggcaggttgaaaccagcgcgcgttatcttggtacggcgctgtactggatagccgccagtatcaatatcaaaccgggccangattattacttttatatccgcagtgtgaacaccgttggcaaatcggcattngtggaggccgtcggtcgggcgagcgatgatgcngaaggttanctggattttttcaaaggcnagataaccgaatcncatctcggcaaggagytgctggaaaaagtcganctgacggaggataacgccagcagactggatgagttttcgaaagagtggaaggacgctaacgataaatggaaygccatgtggggcgtcaaaattgagcagaccaaagacggcaaacattatgtcgcgggtattggcctcagcatggaggacacggangaaggcaagctgagccagtttctggttgccgccaatcgtatcgcgtttattgacccggcaaacgggaatgaaacgccgatgtttgtggcgcagggcaancagatattcatgaacgacgtgttcctgaagcgcctgacggcccccaccattaccagcggtggaaatccaccggtattttccctgacatcagacggaaagctgaccgctaaaaatgcggatatcagtggcagtgtgaatgcgaactccgggacgctcaacaangtcacggtaaatgaaaactgtacgattaagggcatgctggaggcgacncaggtcagaggtgacttcgttaaagctgtatccaaatcattnccgaaacaggctggtacgtggggtaacacggaaacnccaracgggacggttacagtcaccatcagcgatgatcataactttgaccgtcaaatcattattccgcccattatctttaacggaatagcgtatancgatccgggaagtggtaataacccgggaggtacaagntacacgggttatggntttgaagttcgcaaaaacggtgtattaatcgcatccagagaaactaaaggggccattcccggtagntacagtgcggttattgatatgccgagtggcaggggaagcgtcactctggagtttaaggttttccataaaggcaatcagcgggcaggtaatatcaccgactgtacggtgattgtgaccaaaaaagcngcttccggcatcagtatncgttgaaatatttataaccctaataacgggcgccagnnnnnnnnnnnnnnnnnnnncagaaaakcgngaggtaattatgcgtaaagtttgtgcagcnattttgtccgcagccatttgtctggcngtatccggtgngcctgcatgggcgtctgancatcagtccacgctgagcgcnggntatcttcatgccagtacggacgctcccggcagcgatgatctgaacgggattaacgtgaaataccgttatgagtttacggacacactggggctgattacgtccttcagttatgccaacgccgaagatgagcaaaaaacgcattacagcgatanccgctggcatgangattncgtgcgtaaccgctggttcagcgtgatggcngggccgtctgtgcgngtgaatgaatggttcagngcgtatgcgatggcgggtntggcttacagccgtgtgtcgactttntccggggattannnnngcgtaactgacaacaagaggaaaacgcacgacgtnctgaccggaagtgatgacgctcgctacagcaacacatctctggcgtggggngctggcgtgcagtttaacccgaccgaatcagtggccgttgatgtcgcttatgaangctccggcagcggngactggcgcactgacggtttcatcgtgggtgtcggttatnnnntntgattagtaacacagngttatgacagcccgccggttcaggcgggcttttttgtggngtgggtatggcagcagtacaaatatcaggcgtgctgaaagatggtgcgggaaaaccaatacagaactgcaccattcaactgaaagccagacgkmacagcaccanggtggtggtgaacacggtggcctcngaaaatccggatgaggcngggcgttacagcatggacgtngagtanggtcagtacagcgtcactctgttggtggarggattcccgccntcacatgccgggaccatcnccgtgtatgaagattctcaaccnggtacgctgaatgattttctcggtgccatgacggaggatgatgcccgtccggaggcnctgcgncgttttgaacwgatggtggaagaagcagcgcgtcacgcwgaggaggcgaagaagaatgccggagargcngagacgtcngcgaggaatgccggcatatcagccagtmaggcggaagcgagcgcngcaaatgctgatacttcagcagrggangcatcggagtcagcccggcaggcggcagaaagtgcagcctcngcaaagnagtcagaggangcgtcctcgtcctcagcctctgaggccgctcaaaaagccagtgagtcatnacaaagtgcaacagatgccgagttgtcaaraaagacggcagaaagtgcagccggtaatgcagccagggatgcaacgaccgcaacagaaaaagcccgggartcagcagaaagcgcacagtcagcggaacaaagcaggatagcggcggaagasgccgtaaacmgaatycccaccgtggtggggcctcccggaccaaagggggaaccgggtcccgcgggtcctcaggggccgaagggagataaaggagagcgtggagacaccggtccggnnnnngcaaccggtgaacggggaccgggaggagatacaggtccggcaggtccgcaggggccgaaaggygacaggggagagcggggagagaccggtctgacaggaagtacaggtccacagggtccaaagggagataccggkgcaacaggtccggcaggaccrcagggaccgaaaggagaaacaggtgcggctggcccggtgggggcwaccggacctcagggggcgaagggcgacccgggggagacacaaatccgttttcgtctggggccggcgagcattattgagacaaacagcaatggctggttcccgggtacagatggtgcgctcatcaccggactgacctttcttgaccccaaagatgccacacaggttcaggggntgtttcagcatttgcaggtcagntttggtgacgggccntggcaggatgttaagggnctggatgaagtgggcagtgatacaggcagaacnggagaatgacatgaatattttgagaaagcttatgcagagtctgtgcggttgcggaaagcatgatgacygtgaaaacggacggtcacttacagcacaattgcgactgggnccggcagacatnctggagtcagatgagaatggnattattccggagcaggncagggtaatcacncaggtggtgatactggatgcggataaaaagcagatacagtgtgtggtaagaccgctgcaaatcctgcgtgctgacgggacgtgggaaaatattggcgggatgaagtaacccgacagcttcacaaaaccggagtccggctccggtttttgttgtcatgtccggtggatgtttgttaggaaagcaaagatggcaaaactgctggaggttttgtggttgagtatgccaatataattaatagattaaagagttagttgtgaagaaaatatggataaacaggacgacnaatgctttcaccgataaggacaactttccataactcagtaaatatagtgcagagttcaccctgtcaaacggtttcttttgcaggaaaggaatatgagttaaaggtcattgatgaaaaaacgcctattctttttcagtggtttgaacctaatcctgaacgatataagaaagatgaggttccaatagttaatactaagcagcatccctatttagataatgtcacaaatgcggcaaggatagagagtgatcgtatgataggtatttttgttgatggcgatttttcagtcaaccaaaagactgctttttcaaaattggaacgagattttgaaaatgtaatgataatctatcgggaagatgttgacttcagtatgtatgacagaaaactatcagatatttatcatgatattatatgtgaacaaaggttacgaactgaagacaaaagagatgaatacttgttgaatctgttngagaaagagctgagggaaatttcaaaggcgcaggattctttgatttctatgtatgcaaagaaaagaaatcatgcatggtttgatttcttcaganatttagccttattaaaagcaggagagatattcaggtgcacatataatacaaagaatcacggtatttcattcggggaggggtgtatctatcttgatatggatatgatacttacaggtaagcttggtacaatatatgctcctgatggaatttcaatgcatgtggatcgtcgtaatgatagtgtaaatattgaaaatagtgcaataattgttaaccgtagtaatcatcctgctctacttgagggactttcttttatgcatagtaaagtagatgctcatccatattatgatggtttggggaaaggagttaagaaatattttaattttacaccattacataattataatcatttttgtgactttattgagtttaaccaccctaatataatcatgaacacaagtcagtatacatgcagttcatggtaaatgaatttgatatagtttattttgttgtaataaatgatttgcagggtattagatataaacatgaaaattccctcattacagtccaacttcaacnnnnccgccccggcaggatactctgctcccattgctcctaatcgtgctgaaaatgcctatgcggattacgttttggatataggtaagcgaataccactttccgcagcagatttaagcaacgtatacgaaagtgtaatacgcgccgtccatgacagccgtagcaggcttatcgatcagcatacagtcgatatgatcggcaacactgtacttgatgctttgagccgatcacagacatttcgtgatgccgtaagctatggcattcataatgagaaggtacacattggttgcattaaatacagaaacgaatacgagcttaacgaagaatcttctgtcaaaattgatgatattcaatcactaacctgtaacgaattatatgaatatgatgtcgggcaagagccaattttccccatttgcgaagcaggagaaaacgataacgaagagccttatgtcagttttagtgttgcgccagatactgactcttatgagatgccatcgtggcaggaaggactgattcacgagattattcatcatgttactggatctagcgatccatctggagatagtaatatagagttaggacccaccgagattctcgcacgtcgtgtcgctcaagaactgggatggagtgttcccgacttcaaaggatatgcagagccagaacgtgaagctcatcttaggctacgtaacctgaatgcccttcgacaggctgccatgaggcatgaagagaatgagagggctttcttcgaaaggctgggtacgatcagtgaccgatatgaggcgagtcctgatttcacagagtattccgctgtgtctaacataggatacggatttatccagcaacatgattttcctggattggctatcaacgataatttacaggatgcaaatcagatccaactgtatcatggcgccccttatatttttacatttggggatgtggacaaacacaatcagcaatgattcgtctttgcagtgacataaggttactattcatacattttaacggagttgatgatgggtaatcgtgcaacattgtatgtaaaggcaattcccctaattttactgtagtaagtgaacatggccggaacgagactatcagcatcatcggcttcggcccagtaaaaagaggctcggaaaaatgcacaataggcatcacacgtcatgcatggattcaaattgtacataattcaacagtacagctataaatcgtaaagaaactgcagtacgttgtgcacagaaaagtaccgtgattcactattgtacaggtccattgcagcaacaatnttttgtgaattttgcgtgagagaaagaaaaggaataatttgtatataaacaattnnnnnnnnnnttgctggaaaataaataaaactgataattaaaggcttaaagcttgtattaaatcatatttnnaattttttgttttaaatgcagcgtgttattgtgttttttttaatctatcggtctggtacttgtaatcagtgagtatatcgcaccacttcaggatgctgcagatttagatattgcgacggatgagcagacatcgttactggcggcatggaagcagtatcgtatgccgctcaatcatgttgatacgtctgtatctccagatatcgagtgaccggtaatacctgcgttatagttcgtaaacgttcgtttgatgggatgctggaaggatgaattagttgccagatacaaaaagcaagagttcatttctaatttttgttgccatgttaggggggatgtttgttaaggaaatttagatgggtttattttgaaggttgaaatgtatgttatcgccatattctgtaaatttgggatgttcatggaattctttaaccagaaacctgacttcgcctgataatcgtgttttatcctctgtaagggatgctgccgttcattctgataatggggcgcaagtaaaggttggcaacagaacatatcgtgttgttgccaccgataataagttttgcgttacaagagaaagtcatagtggttgttttactaatctgttgcacaggctgggatggcctaagggggagattagcaggaaaattgaggtcatgctgaatgcatcaccagtgagcgctgctatggaaagaggcattgttcattcgaacagacctgatttacctcctgttgattatgcaccgccagagttaccgagtgtggactataacaggttgtcagtacctggtaatgttattggcaaaggggggaacgctgtagtatatgaagatgctgaggatgcaacaaaagtcctgaagatgtttactacatctcaaagcaatgaagaggtgacaagcgaagttcgttgcttcaaccaatattatggtgccgggagtgcagaaaaaatatatggcaataatggtgatattattggtattagaatggataaaataaatggagaatcgcttttaaatatttcgtccttgccagcacaggctgagcatgctatttacgatatgtttgatagactggagcaaaaaggaattctttttgtcgatacaacagagacaaatgtcttatatgaccgcgcgaagaatgagtttaatccaatagatatatcatcttataatgtttccgaccgttcatggagtgaaagtcaaataatgcaatcttatcatggcggaaagcaagatcttattagtgtggtattaagtaaaatttagtaattttatccagtgtagtggatttgttgcatggatggagttggtaacaaattgtgtggttggcaattcttggcggatcacggaaatgggcaatgtcgctgaggactggcaaatggctatgatccgctttattatcgggtttggtgaccgccttgacggtcacttttaaaaaaatcattttcacagagaggtaaacaggctgctaataagtagcattctcaggagtcctgatgcgccctacgtccctcaacttggtattacatcagtcatcaacgtcgagctcaatgtcagatacagatatcgagtctcttgtaaaagcatcgagcgttcaatggataaaaaataatccgcaacttcgtttccaggggactgatcataatatatatcagcagattgaagcagcactcgataagattggctctacagagacagggcgtgtactcctgaatgctattgaatcaatatcccgacttaaatcagaaacagtggtaatacacctcaactcttccagactaggagttatggcacatagagatatagatgctgagaaccatcgggggactggttccgattttcactgtaatctgaatgcagttgaatatccctgtggggaggggattagcgtggtggactttcatgcgactattgtttttcatgagttgctccatgttttccacaatttaaatggggagcgtttgaaagttgagagttcccgaccagaatcacaaaaatactctccacttttactcgaagaagccaggactgttgggttgggggctttttcagaagaggtgctttcagaaaataaattccgcgaagagattgggatgccccgtagaacctcctacccgcncgactcagctcttattcatgatgacaatacagtgagtctgggattccaacaggtaagactgcatccattgctttagctgtgtttcttgtgctgaatatatattggtggggcaaacggaggcacacaaaactttgcactggattgcaaggctttgtgctattccgatagtggttcaggtggagtaccccaccttttcatcaagccagcccacccaccactgcatcatttctctgcgcttatagagatactgagcatggttgtaaattcagcaaacgacgtaatgtgtttgacaaaaaattagcgcaagaagacaaaaatcaccttgcgctaatgctctgttacaggtcactaataccatctaagtagttgattcatagtgactggatatgttgtgttttgtagcattatgcagtctattttttagactaaatgcattgtaatacattgatattattgggttttgctgtttcgtgttcagcttttttatactaacttgagcgaaacgggaaggtaaaaagacaaaaagttnttttttaatacctttaagtgataccagatagcattgcgccatctggcagagtgattaactaaacatcgcggtaatcgatgcgcttgccagagagtggaaatgaacgttaaacccgaccatcgcgccgctggctccttcatcgacatcaatacgctctacatccagcgcgtgaacggtaaaaatgtagcgatgggtttcgcctttcggcggcgctgcgccatcgtatccggttttaccaaaatcggtacgcgtctgcaaaacgccgtctggcattgctaccagaccagagccaaacccttgcggtaatacgcgggtatcagcgggtaaattaacaactacccagtgccaccagccggagccggttggcgcatccgggtcgtagcaggtgacaacaaaacttttcgttcccgcaggaacatcatcccacgccagatgcggtgaaatattatcgccatcgtaacccatgccgttaaagacatgacgatgcggcaacttatcgccatcgcgcagatcgttactgatgagtttcataaaccctcctttctagtttgcagaaagtgtagccagaaactctcacgctgacttcccgttattggcaaaaaaatgtttcatcctgtaccgcgcnnntaaccgctgcggtcagacgctgcaactgttgcgggagaataatatagggcggcatcaggtaaatcagtttgccaaaaggccggatccagacaccctgttcgacaaanaatttttgcaatgccgccatattcaccggacgagttgtttcgactacgccaatggcccccagcacgcgcacatcggcaaccatttcggcatcacgggcgggggcaagttgctcgcgcagctntacttcaatagccgccacctgttgctgccagtcgccagattcgagaatcgccaggctggcgtttgcagccgcacaggccagcggattgcccataaaagttggcccgtgcataaagcagccggcttcgccgttactgatggtttctgcaacctcgcgcgtggtgagtgtggcggaaagggtcattgtgccgccggttaaggctttaccgaggcacaaaatgtccggcgcgatttctgcatgttcacaggcaaacagtttgccggtacgaccaaatccggtggcgatctcgtcggcaatcagcaagataccttcgcgatcgcacattttgcggattcgttttaaccattccggatggtacatgcgcatcccgcctgcgccctggacaatcggttcaatgatcaccgctgcgatttcatgacgatgcgccgccatcaggcgggcaaagcccaccatatcgcgctcatcccattcaccatccatgcggctttgcggggcgggagcaaacaagttttctggcagatagcctttccacaggctgtgcattgagttgtccggatcgcacaccgacatcgcgccaaaggtatcgccatgataaccattgcggaaggtcagaaaatgctggcgcgcttcgcctttggcttgccagtactgcaacgccattttcatcgccacttccaccgctacggaaccggagtccgcgagaaaaacgcattccagcggttgcggcgtcattgccaccagtttgcggcacagctcaatggctggcgcatgggtgataccgccaaacatcacatgcgacatggcatcaatttgcgacttcatcgccgcattaagctgcgggtgattgtaaccgtggatcgccgcccaccaggacgacataccgtcaaccaggcgtctgccgtcagacaaaattagctcgcaaccttcggcgctcgccaccggataaaccggtagcggggaggtcatggatgtgtatgggtgccagatatggcgttggtcaaaggcaagatcgtccgttgtcataatcgacttgtaaaccaaattgaaaagatttaggtttacaagtctacaccgaattaacaacaaaaaacacgttttggagaagccccatggctcaccgcccacgctggacattgtcgcaagtcacagaattatttgaaaaaccgttgctggatctgctgtttgaagcgcagcaggtgcatcgccagcatttcgatcctcgtcaggtgcaggtcagcaccttgctgtcgattaagaccggagcttgtccggaagattgcaaatactgcccgcaaagctcgcgctacaaaaccgggctggaagccgagcggttgatggaagttgaacaggtgctggagtcggcgcgcaaagcgaaagcggcaggatcgacgcgcttctgtatgggcgcggcgtggaagaatccccacgaacgcgatatgccatacctggaacaaatggtgcagggagtaaaagcgatggggctgnaggcgtgtatgacgctgggtacgttgagtgaatctcaggcgcagcgccttgcgaatgccgggctggattactacaaccataacctcgacacctcgccggagttttacggcaatatcatcaccacacgtacttatcaggaacgccttgatacgctggaaaaagtgcgcgatgccgggatcaaagtctgctcaggtggcattgtgggtttaggcgaaacggtaaaagatcgcgccggattattactgcaactggcaaacctgccgacgccgccggaaagcgtgccaatcaacatgctggtgaaggtgaaaggtactccactggcagataacgatgatgtcgatgcctttgattttattcgcaccattgccgtagcgcggatcatgatgccgacctcttacgtgcgcctttctgccggacgcgagcagatgaacgaacagactcaggcgatgtgctttatggcaggcgcaaactcgattttctacggttgcaaactgctaaccacgcccaatccggaagaagataaagacctgcaactgtttcgcaaactggggctaaatccgcagcaaactgccgtgctggcaggggataacgaacaacagcagcgtctggagcaggcactgatgaccccggacactgacgaatattacaacgcggcagcactatgagctggcaggagaaaatcaacgcggcgctcgatgcgcggcgtgctgccgatgccctgcgtcgccgttatccagtggcgcaaggagccggacgctggctggtggcggacgatcgccagtatctgaacttttccagtaacgattatttaggtttaagccatcatccgcaaattatccgtgcctggaagcagggtgcggagcaatttggcgtcggtagcggcggttccggtcacgtcagcggttatagcgttgcgcatcaggcgctggaagaagaactggccgagtggctgggctattcgcgggcactgctatttatctctggttttgccgctaatcaggcggtcattgccgcgatgatggcaaaagaggaccgcattgtcgctgaccggcttagccatgcctcattgctggaggctgccagtttaagcccgtcgcagcttcgccgttttgttcataacgatgtcactcatctggcgcgactgcttgcttccccctgtccggggcagcaactggtggtgacagaaggcgtgttcagcatggacggcgatagtgcgccactggcggaaatccagcaggtaacgcaacagcacaatggctggttgatggtcgatgatgcccacggcacgggcgttatcggggagcaggggcgcggcacctgctggttgcaaaaggtaaaaccagaattgctggtagtgacttttggcaaaggatttggcgtcagcggggctgcggtgctttgctccagtacggtggcggattatctgctgcaattcgcccgccatcttatctacagcaccagtatgccgcccgctcaggcgcaggcattacgtgcgtcactggcggtcattcgcagtgatgagggtgatgcacggcgcgaaaaactggcggcactcattacgcgttttcgtgccggagtacaggatttgccgtttacgcttgctgattcatgcagcgccatccagccattgatcgtcggtgataacagccgtgcgttacaactggcagaaaaactgcgccagcaaggctgctgggtcacggcgattcgcccgccaaccgtaccctntggtactgcgcgactgcgcttaacgctaaccgccgcgcatgaaatgcaggatatcgaccgtctgctggaggtgctgcatggcaacggttaataaacaagccattgcagcggcatttggtcgggcagccgcgcactatgagcaacacgcagagttacagcgccagagtgctgatgtcttactggcaatgctcccacagcgtaaatacccccacgtactggacgcggggtgtgggcctggctggatgagccgccactggcgagagcgtcacgcgcaggtgacggcgttagatctctcgccgccaatgcttgcgcaagcccgccagaaagatgctgcagaccattatctggcgggagatatcgaatccctgccgttagcgactgcgacgttcgatcttgcatggagcaatctcgcggtgcagtggtgcggtaatttatcaacggcactccgcgagctgtatcgggtggtgcgccccggaggcgtggtcgcgtttaccacgctggtgcagggatcgttacccgaactgcatcaggcgtggcaggcggtggacgagcgcccgcatgctaatcgctttttaccgccagatgaaatcgaacagtcgctgaacggcgtgcattatcaacatcgtattcagcccatcacactatggtttgatgatgcgctcagtgccatgcgttcgctgaaaggcatcggtgccacgcatcttcangaagggcgcgaccagcgaatattaacgcgttcacagttgcagcgattgcaactggcctggccgcaacaacaggggcgatatcctctgacgtatcatcttnttttgggagtgattgttcgtgagtaaacgttattttgtcaccggaacggataccgaagtggggaaaactgtcgccagttgtgcacttttacaagccgcaaaggcagcaggctatcggacggcaggttataaaccggtcgcctctggcagcgaaaagaccccggagggtttacgtaatagtgacgcgctggcgttacagcgcaacagcagcctgcagctggattacgcaacggtaaatccttacaccttcgcagaacccacctcaccgcacatcatcagcgcgcaagagggcaggtcgatagaatcatcggtaatgagctccggattacgcgcgcttgaacaacaggctgactgggtgttagtggaaggcgctggcggctggtttacgccgctttctgacactttcacttttgcggattgggtaacacaggaacaactgccggtaatactggtggttggcgtgaaacttggctgtattaatcacgcgatgttgacggcacaggcgatacaacacgccgggctgactctggcgggttgggtggcgaacgatgtcacgcctccgggaaaacgtcacgctgaatatatgaccacgctcacccgcatgattcccgcgccgctgctgggagagatcccctggcttgcagaaaatccagaaaatgcggcaaccggaaagtacataaaccttgccttgttgtagccatcctgtatttggttaaattgcgagcgagannnnngtcttcgattgactgcaatttaaccaattaaattctaaaataatcacgaaaaaaattttacttccgcatcatgcggcgaatgtgggaattgcccaggcggcgggggataggggctgcagacagttatccactattcctgtggataaccatgtgtattagagttagaaaacacgaggcaagcgagagaatacgcggcttgcacgcgaattggcgttaaagacggctcaaagaaatatcttttattttttaactggttagataattgcaatggcagtcactgaacaggcatctcttgccataaaactgacatcactcatcttgacaaatgttaaaaaagccgttgctttggggataacccggtaaggtccgagttttatctcgccacagagtaaattttactcatgattgacagcggagtttacgctgtaacagaaatattatggtgatgaactgtttttttatccagtataatttgttggcataattaagtacgacgagtaaaattacatacctgcccgcccaactccttcaggtagcgactcatgagtaaaccgttcaaactgaattccgcttttaaaccttctggcgatcagccagaggcgattcgacgtctcgaagaggggctggaagatggcctggcgcaccagacgttacttggtgtgactggttccgggaaaaccttcaccattgccaatgtcattgctgaccttcagcgccctaccatggtacttgcgcccaacaaaacgctggnggcccagctgtatggcgaaatgaaagagttcttcccggaaaacgcggtggaatatttcgtctcctactacgactactatcagccagaagcctatgtaccgagttccgacaccttcattgagaaagatgcctcggtaaacgaacatatcgaacagatgcgtttgtccgccaccaaagcgatgctggagcggcgtgatgttgttgtggtcgcgtctgtttccgcgatttatggtctgggcgatcctgatttatatctcaagatgatgctccatctcacggtcggtatgattatcgatcagcgcgcgattctgcgccgactggcggagctgcaatacgctcgtaatgatcaagcattccagcgtggtactttccgtgttcgtggcgaggtgattgatatcttcccggcagaatcggatgacattgcacttcgcgtggaactgtttgacgaggaagtggaacgattgtcgttatttgacccgctaaccgggcagattgtttccaccattccacgttttaccatctacccgaaaacgcactacgtcacaccgcgcgagcgcatcgtacaggcgatggaggagatcaaagaagagctggccgccagacgcaaagtgctattggaaaacaacaaactgctggaagagcagcggctgacccagcgtacccagtttgatctggagatgatgaacgagctgggctactgttcggggattgaaaactactcgcgcttcctctccggtcgtggaccgggtgagccaccgccgacgctgtttgattacctgcctgccgatgggctgctggtggtcgatgaatctcacgtcaccattccacanattggcggcatgtatcgcggtgaccgggcgcgtaaagagacactggtggagtacggcttccgcctgccatcagcgctggataaccgtccgctgaaatttgaagagttcgaagcattagcgccgcaaaccatctatgtttcggcgacgccaggtaattatgagctggaaaaatccggcggcgatgtggtggatcaggtggtgcgtccaaccggattgcttgatccgattatcgaagtgcggccagtggcgacacaggttgatgatcttctttcggagattcgtcagcgagcggcaattaacgaacgcgtactggtcaccacactgaccaagcgaatggcggaagatcttaccgaatatctcgaagaacacggtgagcgcgtgcgttatcttcactcagatatcgacaccgtcgaacgtatggagattatccgcgacttgcgtctgggcgagttcgacgtgctggtggggatcaacttactgcgcgaaggtctggatatgccggaggtttcgctggtggcgatcctcgacgccgacaaagaaggcttcctgcgttctgaacgttcgttgatccagactattggtcgtgcggcgcgtaacgttaacggtaaagcgattctctacggcgataagatcaccccgtcaatggcgaaagcgattggcgaaaccgaacgtcgccgcgagaaacagcagaagtacaacgaggaacacggcattacgccgcaaggcttgaacaagaaagtggtcgatatcctggcgttggggcagaacattgctaaaaccaaagcgaagggcagaggaaaatcgcgaccgattgttgagccggataatgtgccgatggatatgtcgcctaaagcgttgcaacagaaaatccatgagctggaagggttaatgatgcaacacgcgcaaaatctggagttcgaagaagcggcacaaattcgtgaccagttgcatcagctgcgtgaattgtttatcgcggcttcgtgacaggataacgaagaagacagatgacaaaagcaaaattgcctgatgtgctacgcttatcaggcctacatgattctgcaatacattgaattagcgcggtttgtaggccggataaggcgttcangccgcatccgtcataaacaacgcgcactttgtcttcattaggaagccggaattttccttcggatttccgttaacctaaagcctgtaacgccttttccagtgcgctatgtaacaactggcggtcatgacgatacggaatatcgctggcctccagcacctcctgaatcacaatccgctctttcaccgccgagacatccacttttggcccgacgatgaccgcatcaatgacctttttaccaacatactgctccataattgccagcttgctttccagcttcaaattggccgcaggtaaactcaactcacgccccagattgccgatatagaccatcggcgctggcgtgcggcgtaatgcctgcgcgatttccttcancagcagaattggcatcaggctggtgtaaaaactgccaggcccaataatgatgagatccgcttcattgatagcgtgaaccgcctcacgcgttgcgggtacattaggcgttaacaataactcttgaatcggcgtagttaactggtcgatattgacctcgccgtaaacttcatgcccctgatcgtcaatcgccatcagatcaacaggatgctccgacatcggaatcaaatgtgcgtccactttcagcagatttcgaatcagattgatcgcttcaagaggtcgcacgctaaggtgatccagtgccttcaacatcaggtttccaaggttgtgcccggaaagttcgccattaccgccgaaacgatattcaaacattgctgaagcgacgctgggttcagttatcagctggttaaggcagttgcgcatatcgccccaggcaatgccgccttctgaacggcgaatacgccccgtcgagccaccattatccgtggtggtgacgatacccgttaaacgagaacccaaagacgaaagtgatgagagaacgcgtcccagtccatgccctccgccgagagcaacgacacgatcaagatcagccagcgtacgattgcgcatatagtttcctggagtcagattatccgcgctacantannnnnnnttgcggggaaacagcaattaacctgccaatattgaggatacaaactattttcttctacctctaaaggacgatgcacgctatgcctccctgatgatgtatatcaaagtaaaaccgccattttcccttattctgtagcgaaatagcacgatcatgacgctatatacatgattacatagcgaaagtgtggatggtaaaaatctcatttacacgctagtatcggcttaaccactaaacactntagcctctgcacctgggtcaactgatatggtgctttggccgtgacaatgctcgtaaagattgccaccagggcgaaggaagaaatgacttcgcctcccgtatctggaaaggtgtacatggcttcacaactgactgatgcatttgcgcgtaagttttactacttgcgcctgtcgattaccgatgtgtgtaactttcgttgcacctactgcctgccggatggctacaaaccgagcggcgtcaccaataaaggctttctgaccgtcgatgaaattcgccgggttacgcgcgccttcgccagtctgggcaccgaaaaagtgcgcctgacaggcggtgagccgtctttacgccgcgactttaccgatatcatcgccgctgtgcgagaaaacgacgctattcgccagatagcggtcaccaccaatggttaccgtctggaacgcgatgtggcgaactggcgcgatgcgggacttactggcattaacgtcagcgtcgacagtctggacgcccgccagtttcatgccattaccggccaggataaattcaatcaggtgatggcagggatcgatgctgcatttgaggccggttttgagaaggtcaaagtcaataccgtgctgatgcgtgatgtgaatcatcaccagctcgacacctttctgaactggatccagcatcgccctatccagctgcgtttcatcgaactgatggaaacgggcgagggcagcgagcttttccgtaagcatcacatctctggtcaggttctgcgtgacgagctactgcgtcgcggctggatccaccaattacgtcaacgcagcgacggtcccgcgcaagtcttttgtcatccggattacgccggagagattggccttatcatgccgtatgaaaaagacttctgcgccacttgcaaccgtctgcgcgtttcctccattggtaaactccatctctgcctgtttggtgaaggcggcgttaacctgcgcgatctgctggaagacgatacccagcaacaggcgctggaagcgcgtatttcagcggcgctgcgggagaagaaacagacccatttcctgcatcaaaacaacaccggtattacgcaaaacttatcgtacattggcggctaaaacgtcaaaaggagagatcagatgagtcaggtaagcactgaatttatcccgacccgtattgctattcttacggtttctaatcgtcgcggtgaagaagacgatacctccggtcactatttgcgcgattcngcgcaagaagcgggccatcacgttgtcgataaagccattgtgaaagaaaaccgctacgctattcgcgctcaggtatctgcgtggatcgccagcgacgatgtacaagtggtgttgattacgggggggactggcctgacggaaggtgatcaggctcccgaagcattgctgccgttgttcgaccgtgaagttgaaggttttggtgaagtgttccgtatgttgtcgtttgaagagattggcacttccacgttgcaatctcgtgcggtagcnggcgtcgctaacaaaacgctgattttcgccatgccgggttcgaccaaagcgtgccgtaccgcatgggaaaatatcatcgcgccgcagctggatgcccgtacgcgtccgtgtaatttccatccacatttgaagaaataagtatgtcgcaactgacccatatcaacgccgctggcgaagcgcacatggtggatgtctccgccaaagcggaaaccnngcgtgaagcgcgggcggaagcctttgtcaccatgcgcagcgagacgctggcgatgattattgatggtcgccaccacaaaggcgacgtatttgccactgcgcgtattgccggtattcaggcggcaaaacgcacctgggatctgatcccgctgtgtcatccgctgatgctcagcaaagttgaagtcaatttacaggccgagccggagcacaatcgggtgcgtatagaaaccttatgccgcctgaccgggaaaaccggtgtcgaaatggaagcgttaaccgcggcctccgtggcggcgctgaccatttatgacatgtgcaaagcggtgcaaaaagatatggtgattggtccggtacgtttgctggcgaagagcggcggcaagtcgggtgactttaaggtggaagcggatgattaaagttctttttttcgcccaggtgcgcgagttggtaggaacagatgcaaccgaagtggctgcggatttcccaaccgttgaagcgttacaccagcacctggctgcgcagagcgatcgctgggcgctggcgctggaagatggcaaattactggctgccgtcaaccagacgctggtgagttttgaccatccgctgactgacggcgacgaagtagctttcttcccgccggtaaccggaggttaagatggcagaaaccaaaattgttgttggtccgcagccgttcagcgtaggagaagagtacccgtggctggcggagcgtgacgaagacggtgcggtagtcacctttaccggtaaggtgcgcaaccataacctgggcgacagcgtcaaagcattaaccctcgaacactatccggggatgactgaaaaagcactggcagaaattgtcgatgaagcgcgtaaccgctggccgctggggcgcgtcacggtgattcaccgcatcggggaattatggccgggcgatgaaatcgtttttgtcggtgtcaccagtgcgcatcgcagcagtgcgtttgaagccgggcagtttattatggattatctcaaaacccgcgcaccgttctggaagcgcgaagccacgccggagggcgaccgctgggtcgaagctcgggagagcgatcagcaggcggcaaaacgctggtagtttttgttagccggataaggcaccgctgcgtccggcaatttcaccgctcagtacatgcgtttacgctgcgtcgatgcacagcctcatcattttgcagtatccttaagatattccttatatcttcaggagatcgtcatggacagattcccacgttctgattcaattgtacaaccccgggctggcttgcagacttatatggcgcaagtctatggctggatgaccgttggcttattgctgaccgcatttgttgcctggtatgcggctaattccgcggccgtgatggagctgttgttcactaaccgtgtctttttaatcggtctgatcatcgcgcaattagcattggttattgtgttatcagcgatgattcaaaagctgagcgcaggtgtaacgacgatgctctttatgctttattcggcgctgacgggtcttacgctttccagtattttcattgtttataccgctgcttctatcgccagtaccttcgtcgttactgccgggatgttcggcgcaatgagcctgtacggttacaccacgaagcgcgatttaagtggctttggcaatatgctgtttatggcgttaatcggcattgtgttggcatcgctggtcaacttctggctgaaaagcgaagcgttgatgtgggcagtcacctacatcggcgtgattgtctttgtcggattgacggcgtatgacacccagaaactgaaaaatatgggtgagcagatagatacccgcgacgcgtcgaacctgcgcaaatattccattctttgcgcattaaccttgtatctggacttcatcaacctgttcctgatgttgctgcgaatttttggcaatcgtcgttaattcttttttcaccatcaatatcccggccatgtgtcgggattttttttcttactaaaaacgacacttaacaagtaccaggtataaaatacgccttatggccgagcggaagagttttccgtatccataaatacaaaagtattttgtatgcgtgggtttaaatttatnnnnnnnnnnnnnnnnnatttttctataaggacaactaaaagaatggaatcatacttgcaaaacagcaataaattagattttcagcacgagaccaggatattaaacggtatatggctcattaccgctttaggtttggtggcaaccgcagggctggcctggggggctaagtatctcgaaattacggcaaccaaatatgattcaccaccaatgtatgtcgccatagggttattattactttgtatgtatggcttaattaaggatatcaacaagataaatgccgccatcgcaggcgtaatatatctgtttttactctctttggtggcgattgtcgttgcaagtttagttcctgtatatgccattatcgtcgtgttcagcactgcgggcgcgatgtttttaatcagtatgctggccggtttattatttaatattgatcctggttctcaccgttttatgattatgatgacgttgacagggttggccctggtaatcatcgtgaatgccgcattaatgagtgaacggcccatttgggtaataagttgcttaatgattgtgttatggtcaggcattatcttgcatggacgaaataagctccttgaattggcggggaaatgccatagtgaagagttgtggagtccggttcgttgcgctnttacaggtgcattaacactctattactattttatcggcttctttgggatacttgccgcgatagctataacgcttgtctggcaaaggcatacgcgtttttttcattagtcgtaaatgcacatactaaagaacttaactaaacttcacatcgccgcttcatttttcgcccgtagcttcttcgcctggctttccagcaacaggtaacagatcagcgccagcagcagcgggataaagtaatacagcacacggtaagcgagtagggcggcgataattgtgcctttggatgtatgctccccagccagtagcgcgataaacaccgnttccagcacaccaatccccgccggaacatgcacgatgacgccggcaatactgctaaccagcaacacgcccagtacaaagaaatagttcacgctttgaccaagtaacagccagataatcgcccccatgaccatccagttaacgctggaaatcagcatctgggcgagggcgaatttccacgaaggcagcaccagcttttgccctttgatggtcatatggcggtgcttcgcgaaagcgcaaaaccacaaataaaccgcgataatcatcagtaagccaatgccgagaatacgcagcgtagtttgatcgacataccagtggtccggcaactccaccacgcctgcggtaaagataatccctgccagtaaaatatagcccagccagttggtggtaatactgagcgagaaaatccgcgtaatagtgctgcccggcaatcccagacgggagtacaaacgatagcgcataccaatgccgccgacccaggtactgagcgtcaggttgaaggcgtagcagataaacgacaccagcatcacctggcgcttcgccagtttgtgaccgcagtaaaagcgggcgagcaggtcatagcagccgtaaatcagatagctgacgaccaccagcccgaccgcactaagcagcgcaacgcgattgtagtcgcggatgaccttccagacctcttcccagtccacttttttggcgtagaccaccagcaacacaatcaccgcgataaaaaacagccaggtgaggatcttctttgctaagcgccagcgcgggtgtgatttactcatcagggttttacccccgtgttttcagtttctacccgatcctgcgtttccattgtcggttgtgcgggaggatcaacctgcgccagacgtggcgtgtgtgccggaagccagccaaccagcgccgggaagtggcgtaaaaagtggaacgccagcacgcttttggttaggttccaccaggtgcgtttcggcagcatggtctcatcgacctgctgacaatctgcggcaataatgccgttcagattatcgcgcagcgtctggttaaaatgacgatcgtggatgatgacatttgcttcgagattcagtgacaaactgagcggatcgagattactggaccctactgtcgcccagtgatcgtccatcaatgccactttgccgtggagcgggcggcggcggtactcaaacacctgaacgccgcctttaaccagatagttatacagcaagcgcgcaccgactctgacaatcggcatatccggttcgccctgaatgatcagtttgatccgcaccccgcgccgtgccgctttacgcaaggcgtgtaaaaatcgatagccggggaagaagtaggcgttggcgataatgacttctcgccgcgcctgagtgagcattttcagatagtgacgttcaatatcatcgcgatgttcttcgttatcgcgccagaccagcaatacctgcgcttctcccggctggcggttctcttccgctttgtgatgacgtcgccaccagcgtcgtgccgcgctctgtccaggcaggttttccagctcaaactggagaatatcttcgacaatcggcccttcaaggcgtaccgcgtaatcctgtttagcctctggaccgtagctggacatatgctcggcggagtaattcagcccgccaataaaggcgatacgcgcgtcgattaccacaattttgcgatgcatccggcgaaacacattggtgcgcataccaaaaaggcgagggcggggatcgtagtagcggaacactacgccagctgccgtcagttcattgacaaactcatcgctgagatccggcgaaccgtagccatccagcaagacttccgctttaaccccgcgttgcgctgctgccagtagtgccgcatgcagttgtttgccgacgtcatcctcaaaccagataaacgtttcaagaatgatgcgttcttgtgcctcgccaatcgccttaaacaccgcgggataatattgctcgccgttttccagcaactggatcttattgccttcgcgccagctacatttcataaatgaatctccgcacttaaaggggcatgatcagaaaggtgtcgccatgtccgcagcggcaacgcggttggcgcgctggcgctggcatttttgacgtagatcctgtccagtcgtagtagaggaaattgcaccggaaacgtgcgcgccgggcgtccgtgggngcgggtaaaaatctcatccagtccggcctgcacttttaacggatgattagctttttgccgccagtcattgaaatcacccgccaccaataccggttcgccgtccggtagctcattcacccattcggcgagcatcgcaagctgcgcctgacggtgcgcctcacgcaggcccagatgtacgcacatcacatgaatcgcttttccggtcatcggcggcacaatgcggcagtagagcacgccgcgcttttccgcaccatcgaccgaaacatcgcgattctcataatgttcaatgggataacgcgacagtacggcgttgccgtgatgcccttccgggtatacggcattgcgaccgtaggcaaaatcgctccacatagtgtcggcgagaaactcgtagtgcgaggtatcgggccagttttccacatgcagcggatgaacttcgtgcgcgcccatcacttcctgcaggcaaacaatatcggcgctgacggtacgcacggcatcgcgaagttccggcaaaatgaagcgtcggttaaacgcggtaaagcctttgtgaatattgatggtgagcaccttgaacgaaaattgttgtgtttgatcgggcataattttcctgtctttgcctcttatctcattgaaatagtgtagtcggcgtcacaaaaaggtgcggtcttacggaattttccgtaaagttcggtactctgagtaagtagagataaattcttcaggagagaagccatgaagtggcaacaacgtgttcgtgtcgcaacgggtctaagttgctggcagattatgttgcatttactggtagtggcgctgctggtggtgggctggatgagtaagactctggttcacgtcggcgtgggattatgcgcactgtattgtgtcacggtagtgatgatgctggtgtttcagcgccaccccgagcaacgctggcgtgaggtggcagacgtgctggaagagctgaccacgacctggtattttggcgcagcgctgattgtgctgtggctgttgtcccgcgtactggaaaacaactttttgctggcaattgcagggctggcaatccttgccggcccggcggtagtgtctttgctggcgaaagataagaagttacatcaccttacgtctaaacatcgcgtacgccgctgaccctgtcgtggccgttatcaccagtagcggccacaaactattccacacaatatccagactcgcatccttcaaataaatctgcttggtaatgtccgtaaagtggcgaataggattaatccacgtcaggttttgcagccatactggcatgttttccaccggcgaaacgtaaccggaaaggagaatggcgggcatcataaagacaaacacgccgataaacgcctgctgttgtgttgaacagagtgatgaaatcaacagaccgaatcccaccagcgataaaccataaatcaccatcgtaaagtagaacagcgccngcgatccggcgaaggggatttgatacgcccagataccaatcgccagcacaatggtggcctggaaggtggcgacaattaacgccggtacggctttgccgatgaagatctgccaggtggtgagcggcgaaaccagtagctgatcgagcgtaccttgttcacgttcgcgggcgacggaaagtgaagtgacgatcattacgccaatagtggtgatcatggcgatcagcgacggcaccacaaaccatttgtagtcgagattcgggttataccagttgcgtaccaccagctcgctgttgttaggtttcggttttccttccagcagctcctgctgataatttttgacgatctgttgcaggtagttggcggcaatttgcgcactgttggagttacgcccgtcgaggatcaactgcaacggcgcggtctggaaggtatccagtttgcgcgagaagtcagccgggaaacgcaccagtagtaacgccttttgtgtgtcgatggtcgggcggatctcctgtgggcttttcagcagcagcacatgtgtaaaggcgctggcgcgggcaaaacgttgggtcagctccaccgaatgctcgccgttatcttcatcgtagatggcgatggtggcgttggtcacttccagcgtggcggcgaacgggaacagaatcacctgaatcagcaccggtaaaatcagaatcgcgcgggtttgtggttcgcgcagcaacgactgcaactctttgcggattaacgtccataagcgatgaaacatgctcttctccctaatccagccgacgtttggttttcagccacgtcaggccgataaacatcaccgccgaagcgatcaaaaacagtacgttcaccaccagcaccactggaatattcccggcgaggaacaggctttgcagggtgctgacgaaataacgtgcgggaataatgtacgtcaccgcgcggatcaccgcgggcatactgtcgatctgaaaaataaagccggaaagcataatcgacggcaggaacgcggcgttcagggcgacctgagcggcattgaactggttgcgggtaatcgtggaaatcagcagccccatccccagggtactgagtaaaaacaggctggagataaaaaacagaatcagcagcgaaccgcgatacggcacgccgagaataaacactgacaccagcatacacagcaacatcgccagcatcccgagaaagtaataagggatcagcttacacagcagcagttccgtgcgggtaatctccgtagagagcagagcctccatagtgccgcgttcccattctcgcgccaccaccagcgaggtgagaatcgcgccgatgaccgtcatgatgatggtcaccgcaccggggataataaagtgctggctaatcgccnccgggttaaaccagtagcgggtttgtacatcaataagcggctcaaaggtctgcccgttatcctccgcccgctgcatttgccagatctgccagatcccttcgacatatccctgcacaaagttagcggtattcggctcactgccgtcggtgatcacctgaatcggtgcggtagcgttggcgcgctccatctgttcggcgaaatccacgggaataaccaccagaccgcgaattttccccgcctgcattttggcgatcagttcctgacggttatcgctgatggtggcgtcgatgtagggcgaaccggtcatggtgtgggtgaaatccagcgccgcttcgctacgctgttccagtaaaatcccgacccgcagcttgctggagtcgaggttaatgccataaccaaaaataaacagcagcaacagcgggatcactaccgcaatcagccagctactcggatcgcgaacgatctgccgcgtctctttgacgcacagcgcccgcacgcgacgccaggaaaggatcgggttactcattgctatgctccttatcccagtcgtggatcaactgaataaaggcttgctccatggtgggatcgggttgctcatcgttagccgactgtgctttcaaatcgtccggcgtgccgctggcgattaatttcccgcggtacaccaggccgatgcggtcgcaatattccgcttcatccataaagtgggtggtgaccatcaccgtgacgcctttctctaccatgctgttgatgtgcagccagaattcacggcgggtgagggggtcaacgccggaagtcggttcgtcgagaaacagaatatccggttcatgcatcagcgaacaggccagcgccagccgctgtttaaaacctaatggcagttcatcggtggcgtgtgaggcaatacttttcaggccaaatgcctcgctcatacgggagattttttcgttctgcgcccgaccgcgtaagccatacacaccagagaaaaagcgtaaattctgttcgaccgtcaggttgccgtagagcgaaaatttttgcgccatatagccgagatgctggcgcgctttaccggaactctctttcagatccatccccagcaccagcgcctggccggaagtcggcaccagcaaaccgcacatcatcttaaaggtggtcgatttgcccgcgccgtttggccccagcaaaccaaaaatctccccgcgtttaacggcaaagttgacgtgatcggtggcggcaaaatcaccaaatttcttggtcagttctttcgcttcgatcaccgtctcgccgggtgtgccttctaccgtatgcaatattgcacccagcggcgattctgaggttccggcaccgcccagcaaatcaataaacgcatcttcaaaacgcggcgtagtttcgttgatgttgatttccggcatcccgtcggcatggcgaatatcgtctggtgtggcctcttttttgaggatcagacgtaccgatttcccctgaatcatgccgtcgctgacctgcggcagtttcaaggcgcgttgcaacagtttgcggttgccctcgtgtggactggtcatcagaaagctgcgtccggccatggtttgtgtcagggcttttggttctccctgatacagcaactcgccttcgttcatcagtaacacgtcacggcactgctcggcttcgtcgagatacgaggtactccagangattaacatcccttcgcccgccagctcatgcaccatctgccacagttcgcgccgtgagatagggtcaacgccgacgccgggttcatcgagcagcaacactttcggttcgcccaccagggtacaggccaggccgagtttttgtttcatcccaccggagagcttgcccgccaggcgtccggtaaacgggccaagagacgtaaactccagcaggcgagcaaaagtctgcttccgtgcctcgccggtgacgctgcgcaaatccgcgtacagattgaggttctccatcaccgtcagatcttcatacaggccgaatttctgcggcatatagccgagcacggcgtgcagcgcgccgtcgtttttgatcggatcaaagccaatcaccgtggcattgccgctgtcgggtttcagtaatcccgccagcatccgcatcagcgtggttttacccgcaccgtctggccctaccagccccgtcacataaccggcatgaatggtgcaatcgagcggcgcgacggcgggcttgtccatgcccggaaagcgtttttccaggccgttcagcgtgataacggcatcattcatgtcctgcctcgtcaccgaattgtaccgtcactggcattccctggcgtaacgcatcatcggcgtcggtcaccacaatacgcaggcgatagacgaggtcggtacgcagatccggtgtttcgacggttttcggggtaaattcagcagtcggcgaaacgaaaccaatctgcccgtgatagggcttgtccgggcgaccatcggtataaagcagcactttgcgccccggctgggcctggtcaagattccgttcatcaacataagcacgcacccacaccggacgcgttagtgaaacggtaaacaccgtgccaccttcattgagaaccgtgcctggctccaccgcgcgcgttaacagcgtgccatcagacggtgctatcaacgttgagtcctgtaaattcagctccgcctgcgccagttgcgcctgcgcctgttcgaggctggctttcgcctgagcgatgtcctgttcacggttaccggaacggtactgacgcaatttatcctgtgctgatttcagcgttgcctgtgcctggtcgcgcgaggagcgggcattttccaggtcatttgccgaaatggtgcggcttttccacagtccttgctggcggttatagaagttctgcgcatagtcataggcggcttgcgcctgtttcaccgctgcggcggcctgagcgatttnttcatcgcgatacccggcaagcatcaggtcatactgcgcctgtgccaccgagacgcccgctttcgcctgcatcagggcaatctcatacggcttgtgatccagttcgcccagcacctggcccgctttgatagcatcaccttcgtccaccgccagcgattcaacgcgccccccaacacggaaactaagattcaccgtacgaatatccacgttgccatacagcgtcaggccgttatcctggcggctttgataccaccagtagcntccggcaaccacggcggcaagtaccactaccgccagtccgatcacgacaggttttttcatcactacaaactcctttgcgataatccttgcaaaatcaggtcgatatgacaggtcaccgtctggttgatcagttcggtcttttcttcatcgaacgcggtccagccggtacgtaacagaattgtttctttgccaagacggaacgccagaatctcaccaatcaacgcatgggtatgaaggatcatgcgggtgtcattggcgtcgcagccggtccaggcggcaatcaggcgtgtcaggtggctgtgtagcggactaatcacctgttcgtgcaccaggtggtaggctgccgtgggagagagctgctcacgggagataaacttgctgaggttgacggtgtcatcctgggtgagcagcttaatcatgttcctgcaggcgcgaaggatcagttcacggatggcagcccgatcaggctgtggttgggcgaacaagcgttcggcttcctcggcatgcggacggaactgctcgccaataaaatcggcaatccactgggcgcaggcgaggtacaaatcttctttcgaaccgaagtagtaggtgatggcagcgatattctgcccggcctgggcggctatctcgcgggtggtggcgttcattccatattcaccaaactgcgccagtgcggcagcaatcagctgttttttcgcctgttcacccttgattgtcatggcaggattattcatcgcacagtccattcttaatcaaatgattgattaagattatgactccatatgggagttgtccagtatggctaagaattttagctacgccagtcacagggataatttatgcgctgcgtcacaaaaactgctacactccgctccctcatgacattgtggtttttgtcattttccttttcagtatctccctgaaaactacaccggtaacggtcggggcggttcggagtagttatgtctttcgattctttgggtttaagccctgatatcctgcgcgccgttgccgagcagggttaccgtgaacccacccctattcagcagcaggcgatccctgcggtgctggaaggccgcgacctgatggctagcgcccagaccggcaccggcaaaacagcgggctttacgctgccgctgttgcaacacctgatcactcgccagccgcacgccaaagggcgtcgtccggtacgtgcgctcattcttaccccgacccgtgaactggcggcgcagattggcgaaaacgtccgtgattacagcaaatacctgaacattcgttcgctggtggtgtttggcggtgtcagcattaacccacaaatgatgaagttgcgcggcggcgttgatgtgctggtggcaacgccgggacgtttgctggacctggaacatcagaatgcagtgaagctggatcaggttgaaatcctcgtcctcgatgaagctgaccgcatgctcgacatgggctttatccacgatatccgtcgcgtgttaacaaaactacctgcgaagcgccagaacctgttgttctccgcgaccttctctgacgatattaaagccctggcggaaaaactgttgcacaacccgctggaaatagaagtggcacgccgcaataccgcgtctgatcaggtgacccagcatgttcactttgttgataagaaacgcaagcgcgaattgctgtcgcacatgattgggaaagggaactggcagcaggtgctggtgtttacccgtaccaaacatggcgctaaccatctcgctgaacagcttaataaagatggcatccgtagtgcggcgatccacggtaataaatcgcaaggtgcgcgtacccgtgcgctggccgattttaaatcgggcgatattcgtgtactggtggcaactgacatcgctgcgcgcggtctggatatcgaagagttgccgcacgtcgtcaactatgaactgccaaacgtaccggaagattatgtccaccgtatcgggcgtactggccgtgcggcggcaactggcgaagcattgtcgctggtgtgtgttgatgaacacaaactgctgcgtgatatcgaaaaactgctgaaaaaagagatcccgcgcattgcgattccgggttatgagccggacccgtcaatcaaagccgaaccgatccagaacggtcgccagcaacgtggcggcggcggtcgtgggcaaggtggtggtggtcgcggtcaacagcaaccacgccgtggagaaggtggtgcgaaatcagctagcgcgaagcctgcagaaaaaccatctcgtcgtcttggcgatgccaaaccggcaggcgaacaacaacgccgtcgccgtccgcgtaaacctgccgctgcgcagtaataccatgtaagggcaaaagagtatcacaggcttttgcccattattcaggtaacacggtcagacatgcatgacatgtctgattttattgttttaataaatttgctttatgatctatctagtgtatctaaaatgacaatgaaattatttcttcttgcaatttgaattattgttaataacattggttgatattcataaacaaattctgggaaaatctggaataaacatgctattgcataaagagtttgttcatcatctggtaaattattatgagatatgtgattcagtattagcttgattctgtccctgattttattattttcattgtctatagtgtatccgactatctccctaagcaaaataaagtgtgcagtcgtttcattaccgtatatctttagtagttctaataaactatcaaaaatcgctcatttcagcttattgatagaaagattgattgccagtctgtttagagccgtacagcagcaaactttcataaccaggttgatcctgaatttgcagtacgaaaagttaaaaatgagcgatttctgtaagactccccattttgccaggcttatgattcgcagatcattcaagtgcaaaggagcgatgtatggattgttcaaaatgcaatggttatgcgacgatgttattaaatatggtgcagggttctgacccggttaatttactggaattacatggtttccttgaacatttcgcatattatgtttcatttggcaaatttaatgctggccaccagcgctataatgcatttaaaaaattcgtcagtgagatttcggagatcagcgcaaatgatatcaatatgacgattaaaaccgggcaatccagacatgaaaatgtgatctctataaatatgaatgatgcaattcctcgtgatgagaaagggatcaccgttagaatagataatattaatggaaagaaaaacaactctaattcatcagatgtttttattccttatgtaaatacatttcccgacctcaaaaataaaatactcaggatgaaaattgaactgactgaaggtagtggtttttctaaaagtctttctgacagtcagattgagatgcatattctgaggactgttaattcgctaaatgttggcgagaaattgaatgatgataatcttgcagatcattctatattcactaacgaattctctgttattattccgccatcctattatgatgcaacttctgcagtaaacgctaataatattgtgagagaaaaactatttgaaagtgatagtaaagttaaagatatcgtcgatgatatgtctaatcatgacgtggagagcgaaaaagatatatttgtaatcggggggatgatagaaaaactgaattctctggcagacgaatctttcaatgatagtactgatnacatacaaacagtaaaagatctgttaacgcaattaactgatggcatggagctcttcgcgctgcgggacatagtggcattcccatcaaccataatagcaaaattaataaaatccccacttaatagcgatcatgaacttgttatgcgcgcactggatacgtatctgtgctacttcagaaataaaaatctgaataacaatgcggaaataattaactttttccatgtcctctttttaaagagaccagagttgatggttgctgaaaattatagatttattcaatttattgatttgctttttgaaaacggaaatgttgaagagaaaaacttagcatttgacctttatcacaattatctttcattatctgaaataaaacaattcgttactgaagaaattaaattgaatttcaatgagcagcaaggattgttagataaagataataaatgttatatcctgttatcatccgataactctgggcgagtaatgcgcttatcgcaccaggcgttaatctcaatgcttgagccagaggttaagaaaaagactatctggaataattactctatttatccatctttgcaggatacccatgaagttgtcagagatgatccagaaacgatttgtatgcgtgcatttcctttatttgcaaaaggatgggaatatgcgcagaaaaataagaaacatcaattgatcctcaatgctcttggattcaaaggttatattcgtgatatatttatgtcagcaataatgcgaaaaacagattttgtgctcgaatgcaataatcaaccgacagaacttaattcatcattttcctctttgatgaacgattcagatcaatggcaacagcatactctgaaagataaacattacgctaatctattaacgatgctggatctcaatgatgccagtgaaagtgataagtctaaaatatttttctgcctgtctgccgtatttgcanatatttctcacagtaatgtctttaacggtattcctgatgcgtcaaaaactttaaaacgttatgcatttgctttattggcgaaagctcattctttagatgaaagtatgataagcaatcaaacttttaatacatacaaaacggtattgcttgatttcaataatctgtctaatgaagaggccaaccagttgcgcataagttcgttatatcgtgatatagtccgctatgcacaatatcgtttttctaaagttttatccgagtggacgccagacgcatggctgtaaagatcgcagcagaataatggcattgatggccctggctcaggccagggtcggcaataccggttcctgagaagcgatgacggcggcaattgtaaccacgaaatgcggtatcacttgctgttttctgccctgaagactggcgctcactgtgccgtcgaattttcaatcaaatatattgcgagagggcgtgtttgcgagccgctttccagaaacagaaaaaccattacccctgaaaaccgaaaaatgccacaatattggctgtttatacagtatttcaggttttctcatggcattaaccgccgcgcttanagcgcaaattgccgcctggtataaggcgcttcaggaacagatccccgactttattccccgtgcgccgcagcggcagatgattgcggacgtcgccaaaacgctggccggagaagaagggcggcatctggcgattgaagcccccactggcgttgggaaaacgctctcctatttgattcccggcatcgccattgcccgcgaagagcaaaaaacgctggtggtgagtaccgccaacgtggcattgcaggatcagatctacagcaaagatttgccactgctgaaaaagatcattcccgatcttaaattcactgccgcttttgggcgtgggcgctacgtttgcccgcgtaatctgacggcgcttgccagcactgagcccacgcaacagnnnntgctggcgtttcttgacgacgaactgacgccaaataatcaggaagagcaaaaacgttgtgcgaagctgaagggcgatctcgacacttataaatgggatggtctgcgcgatcatacggatatcgctatagatgacgatctctggcgtcgtttaagtaccgacaaagccagctgcctcaaccgcaactgttactactatcgcgaatgcccgttttttgtcgctcgtcgggaaattcaggaagcggaagtggtggtggcaaaccatgcgctggtgatggcggcgatggaaagcgaagccgtattgcctgacccgaaaaatttactgctggtgctggacgaaggccatcacctgccagatgtggcgcgggatgcgctggagatgagtgccgaaatcaccgcgccatggtatcggctacagctggacttgttcacgaaactggtcgctacctgcatggagcagtttcgcccgaagaccatcccgccgttggcgatccctgaacgtttgaatgcgcattgtgaagagctgtatgagcttatcgcctcattaaacaacattctcaatntctacatgcctgccgggcaggaagcagaacaccgttttgcgatgggcgaactgcctgatgaagtgctggagatctgccagcggctggcaaaactcaccgagatgctgcgtggtctggcggagttatttcttaacgatttaagtgagaaaaccggcagccatgacattgtacgtctgcatcggttgattttgcagatgaaccgcgcgttggggatgttcgaggcgcaaagcaaactctggcggctggcttcgctggcgcaatcttccggtgcaccggtgaccaaatgggcgacgcgggaagagcgcgaagggcagctacacctctggtttcactgcgtgggaatacgtgtcagcgatcagctggaaaggctgctgtggcgcagtattccgcacattattgtcacctccgcaaccttgcgttcgctgaacagtttttcgcgtttgcaggagatgagcgggctgaaagagaaagcgggcgaccgttttgtggcgctggattccccctttaaccactgcgaacagggcaaaattgttattccccggatgcgcgttgagccttccatcgacaacgaagaacagcatattgctgaaatggcggcctttttccgtgagcaggtggagagcaaaaaacatctcggtatgttggtgctgtttgccagcgggcgtgcgatgcagcgctttctcgactatgtgacggatttacgtctgatgttgctggtgcagggcgatcagccgcgttaccgtttagttgaactgcaccgcaaacgcgtcgccaacggtgagcgtagtgtgctggtgggcttacagtcatttgccgaagggcttgatttgaaaggtgatatgctcagccaggtgcatatccacaaaatcgcttttccgcctatcgacagcccggtggtgatcactgaaggggaatggctgaaaagcctcaaccgctatccatttgaggtgcaaagcctgccgagcgcctcgtttaacctgattcagcaggttgggcgactgattcgaagtcacggttgctggggcgaagtggtgatttacgataaacgcttgctgaccaaaaattatggcaagcgactactggatgcattaccggtatttccgatagagcaaccggaagtccctgaaggtatagttaaaaagaaagaaaaaacgaaatccccacgccgtcggcggcgttaatgatgtgagtcaggtaaggagtcgtaaatggactatcgcaaaatcattaaagagatcgggcgcgggaaaaaccacnnnnncgatttagaccgggatactgcgcgcggtctgtatgcccatatgctcaatggtgaagtccctgaccttgagttgggcggtgtattgattgcgctgcgtatcaaaggggaaggggaagcagagatgctcggcttttacgaagccatgcaaaatcacaccatcaagctgacgccgcctgcaggcaagccgatgccgattgtcatccccagttacaacggcgcgcgtaaacaggccaacctgacgccgttgttggcgattctcctgcacaaactcggttttcctgtggtggttcacggggttagcgaagatccaactcgcgtgctgaccgaaaccattttcgaactgatgggtattacgccaacgttgcacggcgggcaggcgcaggcgaagctcgacgaacatcaaccggtgtttatgcctgtcggcgcgttttgcccgccgctggaaaaacaactggcgatgcgctggcggatgggcgtgcgtaacagtgcacataccctggcgaaactggcgacgccatttgccgaaggtgaggcactgcgtctttccagcgtttcgcatccggaatacatcgggcgagtcgcgaagttctttagcgatatcggcgggcgggcgttactaatgcatggtactgaaggcgaagtgtatgctaatccgcagcgctgcccacagatcaatctcattgatcgtgaagagatgcgggtgctgtatgaaaaacaggaccctgctggaagcgagttactgccacaagcaaaagatccggaaaccacggtgcagtggattcagcgttgccttgctggccgcgaaccgattcccgaatcgctgaaaatccagatggcttgctgcctggtggctacgggtgaagcggcaactatcagcgatggcctggcgcgcgttaatcaggcattttaattcttttctcagccggatgagccatgtcatccggcttttaccccaccgcannnntgaaattcctgcatctttattgaccttcccgcgcccggcgtgcagcataaaaaaacaacaaacacataacataaacaggagttaaccatggaaagtggtcatcgctttgatgctcagacgctgcacagctttattcaggctgtatttcgtcagatgggtagcgaggaacaagaagcgaaattagttgccgatcatttaatcgcggcaaacctggcagggcatgattcacatggtattggcatgatcccaagctatgtacgctcctggagtcaggggcacctgcaaattaaccatcatgccaaaatcgttaaagaggcgggggcggcggtcacgctcgatggcgatcgcgcatttggtcaggtcgcggcacatgaagcgatggcgctggggattgagaaagcgcatcagcacggtattgccgccgtggcgctacataactcgcatcatatcggccgtatcggttactgggcggagcagtgtgcagcggcggggtttgtctctatccactttgttagcgtggtcggtattccaatggtcgcaccgttccacggtcgcgacagccgctttggcaccaatccgttctgtgtggttttcccacgtaaagatgattttccgctgttgcttgattacgccaccagcgccattgcatttggcaaaacccgcgtcgcctggcataaaggcgtccccgtgccgccaggttgcctgattgacgttaacggcgtgccgacgaccaatccggcggtaatgcaggagtcgccgttgggttcgctgttgacctttgccgaacataaaggctacgccctggcggcaatgtgtgaaattcttggcggggcgctttctggcggtaaaacgacgcatcaggaaacgttacaaaccagtcccgatgccattcttaactgcatgaccactatcatcatcaacccggaactgttcggcgcgnnnnnntgtagcgcgcagaccgaancctttgccgagtgggtgaaagcctcgccgcatgatgacgataagccgattttgctcccgggcgagtgggaagtgaacacgcgtcgcgaacggcaggagcaggggattccattggatgcgggaagctggcaggccatttgtgatgcggcgcggcagattggtatgccggaagagacgttgcaggctttctgtcagcagttagccagctaaaaaaaagcccgtccagtggcggacgggcaaacaagggtaacataggatcaatgagggttagagcatatnnnntctgtcggcaaacagacagggaaatacttgtgctggacgtagcgtaaacgcctgatccgtccaacggttcggattttgtaggcctgataagacgcggtagcgtcgcatcaggcatctgttgccggatgcggcgtaaacgccttatccgtcctacgaattacttataaattaccgcagtaccgcttaatttattgttgttggtggcggaagtgatgctatatccactggcaccggctgccgccgnnnnctcagccagtttcgcttccagggcatcgagggtggatgcgccatcggcagaaaccacgccgattttattcatgttctgtgcctgggatgccgttaccggttccgcggcaaacacgccaaatgacagagctgaaagagccatagcagcaacaacagtattgatagttttcataattaatctctcgcaggtgatttttgtataagtgacgttgtttcgtcgatgtgatgagtatcacgtttttttacgagagataaaatcgaagagaattgaccgccttgttcaaataaattgattgatatctaacatactgataaaccatttatttgttgtacttatggacttgttttatgcagcgtggcagtcacgacagcgttaaaggcacggaatgccacgcaaaatacaaattatactcgctatacatctcgccagttgtagttaacgtaactggctttctttcgaacctctgcgattatatcctgtataagctggtttttgtaaatctttctcctgctgacaatgaatacataagcgcacgccaggaatggcttcccgacgggcttgcgggatgggggcaccgcactcttcacattcatacaggctttcgccacgcggaatttcaccccgagcgcgggcaatcgcatcttcaattgtactgttgatctgttcgttgacggcgtcatcgttagcccaaccggatgccatatcgtcctccccatatatcaatgcttgtacagttaagtgtagctaatatagggacgaacctgggcagttcaagcgtcagatctccgaccattcccgcagcagattatgataaagattgagcagcgacaggatctcttcattttcaccatagcggcttttcagcgactgaatattctgaatatttttgtccagttcaaacagcatggcgcgctttttatcatcgcggatcatcgactggatccatataaatgatgccantcgtacgccgcgggttacgggtgtcacgcaatgcaggctgctggagggatacaacaccagatcacctgccgggagttttacccgatgttgtccgaaggtgtcattaacgaccagttcgccgccgtcgtagctttgtggatcgcttaaaaacagcgtggcagaaaggtcagtgcgcatccagccgttttgtggatggctgcgtactgcgccatccacatgaaaaccataggtttcattgttctgatagcgattaaacagcggcgtggaaagggtacgcggcaaggcnnnngcaaagaacaaagcatgttggttaaccgcgttcagcacctcattttgcagggcggcgtataacgtgctgcgggtgtctacctgttgattgttcttaacttgcgcaccttgtgcgccggtggtgacgcgtccatccacccattcggcttgttccagttgttcgcgaaaacgggcgacgtcctgtggcgataacacgccgggaatgtggtacatcatacaagttctccaaaaagtggggcctgcgccccacatctgaatcagaaatgcatattggctgtgagcaagaaggttcttggctcgcccgggtgataacggtagccgctcttattgattgaggcgacgtaatcggtatcaaacaggttgtagacgtttagctggaagtcgagattgcgattaacccgataccccagtttggcatcggcgacccagtaaccttcggtaaacgctggcgttcccaccgcgccgtctgaacctttatgcatactgccgatatagcgtgcgcccgcgccaacagagatatcatcggttgcctgatattggctccataaggtgaaggcgtgctccggggtatacggcagcgatgaggaaccatcctgggcaacatctttgccgtttttgatggttgctttttgctgggtatagccgccaatcacctgccacgcgggagtgatattccctgccacggatatctcatagccttcgacgcgtttcttaccgtattgcgagtaagtcccgtcatcattttgctcaacttcattttcgatatcagtacggaacagcgcggcggtgagcaacaggcgtttatccagaacctgccatttggtgccaatctcgctggtgttggctttttgcggtttaaaatcggtgcggttggcactgttaccgctgccagactgcgcaagggcgaagttgttgccgcccggaggctgctgggaaacggcatagttaatatagacattgccgttttccgtcaggtgatacagcgccccggctttccagttcaccagattgcccgacttggcggtgtcgacggtggtgaccggagaaccttttgccacaccagctgggcaggtgatggcaccgcgtccgctgccnccgcaggcggtggcactgtcatattcagtatgataattatccagacggatcccgccgttcagctcaaaatcacgggtgatttgcagcgtatcgaatgcgtaaattgcgaaggtatccgtctgaccattggcgtttgcgccgttgcgcgtcaggccgccgggatgaatgctgctgtcaggatgataaatatttaccgcaggtaacgtcaccggattaacgccgtagttagtctgcgtttcacgggtaaattccacgccggtactgacatcatgaccgatagaagcggtatagaacgtcgaggtcaggttggtctggttggtgagaattttattactcacatctttggtattcgccgtgcgtgaccacgtccagctattcacatcgctggtgggctgggtaatattcgacgccccacccataatcgccgtcatcaggtaatcctgcttcacgcgcgaccaacgggtagtgttgcgaatggtggtgttatcgttgatgtcgtgctcaaaacgcatggtggcggtgtcggtggtcgaatcgtcgtaatcggaatccgtgccgtaaaagttatgcgtatcaacttttccggaatgattcagggtcgccgttcctgcagatggggcagaatagcccggcaaaccgatggttggaatgccgccgtctggcgtgttgtgctgggtgacatgcagataattaagatacaaacgattcgctgtaccaaggccaaaagcgatagaaggggcgacgccgtaacgctcatttttgactttgtcgcgtccggcatcgtgcgttttttcgcccatcacattcaggcgcaccgcagtggtatcaccaatgacctgattgacgtccagcgtgccgcggcggaaccaggcgctgccaatactggcggaggcgtcaatgccggaatcattgcgcggctgcttgctgatcatattgatcgagcccgtcggcgcgctgcgcccgtagtcggtgccggaaggccctttaatcacttcgacctgctcagtattgaaggtgtcgcgcgagacgctgccgatatcgcgaatgccatcaatataaatactgttagaggtatcagcaccgcgcatataaatggcgtcgccagtggtggagttaccgttctcacccgcaaaaaacgcacccacgccggggacgtttttgagcgcatcggtaaggttggttgcgccctgatctttaatcacttgttcagaaatcaccgtcatcgtgcgggtagtatccgctaccggacgcgagaatttcggatcggcagattgttgtggcgcataaagcgaaggcgttgatgcttcgacaaccagcgtgtcatccgcgttagtttgcccttcggcggcgagtgcctgagccacaggcgtgatgccaatacaaagaccggcaaagaacgtgagcgaatgaaattgtctggcagggaaattgcgattgttttccattttgcaggtgactttttcttatatgttgaaattttcactgccacgagaaagcctctctgcggatgcgatgccactgttaatctcgtgatagtgttcgtgcaagtgataataattttgataagcattatcacttggcgcgattttctatcacccattgcgcgaaaaagaaatacatttatttacattgcgttcatatttgatgttttttgattacaaaacaggcgaaaactgcatccagaggcgaatgcagttacgttggtggggttatttgtagatggttgcagtaccgaacatctggtcatttccgcctgcggaattaatgacataacctttcgcgccttgctcgcgcgctttttctgccagtttatcctccagatcgcttaggtttgatgcgccagttgccgaaacggtacnngcgggccgtagctgaccgctgtccaggttactcatcggttgcgcggcataagccgtgagagagattccgctcaggacggtggcaatcagtagtgtgaggcactttttcataatgacatcctcataaatacaacgggtagtgcctgataagtgtaggtcgcctgcgcgatgcaaatgacgcaaaaaattgacagagatgtgcttattttttgaacgatatatntttacaaaataagacaaatcaatgacatgcataatgctgatttttatgatgaattgccataaaccatagccatgttaaggttttggggaatgataaacgcagccagatatttaccctgtcgcgttatgcgggtatcttacgccgctgcttaaaggagaatgctatgtccgcccagaaaccggggttgcatccgcgcaaccgtcatcacagccgctacgatctcgccacgctttgtcaggtcaatcctgaactcaagcaattcctcacgcttacacccgccggggagcaaagcgtagactttgccaatccgctggcggtgaaggcgctcaataaggcgttgctggcccatttttacgccgtagcgaactgggatatcccggacggttttctctgcccgccagtaccgggccgggcggattatattcatcaccttgccgatttactggctgaagcaagcggaacaattccagctaatgccagcattcttgatatcggcgttggtgcgaactgtatttatccgctgattggcgtacatgaatatggctggcgttttaccggtagtgaaaccagcagccaggcgttaagcagcgcgcaggcgatcatcagtgctaatccggggcttaatcgcgccattcgtctgcgtcggcaaaaagagagtggggcgatttttaacggcatcatccataaaaacgagcaatacgacgcgaccttgtgtaacccgccattccacgattccgccgctgcggcgcgggcaggtagtgagcgtaaacgccgtaacctggggctgaacaaagacgatgcactgaactttggcggccagcaacaggagttgtggtgtgaaggcggtgaagtcacctttatcaaaaagatgattgaagagagcaaaggcttcgcgaagcaggtgatgtggtttacttcactggtatctcgtggtgaaaacttaccgccgttgtatcgtgccctgacggacgtgggcgcggtgaaggtggttaaaaaagagatggcccaggggcaaaagcagagtcgctttattgcctggacctttatgaacgacgagcagcgccgccgttttgtcaatcgccagcgttaaagcgttggctcccccggcggtaacggttcagccggggtcgcgcccggagcaggcagcacctnataagtctgcaccggcgcgcgaacgcccgccaggtcgaaatgttttttcacctggctgtcgagggcaaagcgtaccgtccactgtttgagtggcagcgtggtgaacgaaacacgcagtgtaaacgcggtattgcttaagccaacaatcccggcaaagttcggttcaccaataatcagcccacgaatttcttcgttttccattaattccgctaccgcatctttcagtgcctgattggctttatcagcatcttcatggcgatcaacatcgtagtttgccactaccgaaccaatgccgcggacaaagttggcaaaggtggtaatcgaagaccacggaatgatgtggtacgccccggtatcctggcgtacgcccacggagcgaatcgacatccgttccacagtgccggtcaacggcccaatagtcaccaaatctccagtgttcatgccgttttcaaactgaataaataccccggtgataatatctttcaccagcgtttgcgaaccaaacgagatagccagacctaatgccccggcacctgccagcaatggcgcgatattgacgccgatttccgacaacacaatcatgatggtgatggtactgataatcaccgccagcgcgttacgaaacagcgtaagcagggtacgcgtgcgggcgctgggtagcgggcggccatgaatatccgaagccagccggttttcgatcaaactggcgagcaccgtccagccaaccgccgagaagaaaagaatgagtgcgatacggatcaggatatctacggttttctgccccgcgccgttttgcagccagttccagaaatcgaacaatccccatgcgctcaacagcagcattaccgccacgcagacggtcagaatacgcgccgttttcagcgccgccgaaagccagccattcagccgtttttgcaactccggatagttacgctgagtatgtggcgagagagtgatggtttttgccagccagcgggaaaacataccggaaacaaatgctgcgataccaataatcgccaggctgcgcactgttgcacccatcataaatttcaggctgttgcccggatcgaacaacgaaaagaaaaacagcacgataaaataggcgcttgccagccagtgccacaccagcgcaaaggcgcggataaacaggctgaaaaaggccagcgaatgctccgcaaagttgagcaaatgctgggtaatctcttttttattacgaaagatcaggtacaacgcccagacggtcatgcacagcataatgatgacgttcgccagcgcacctatctgtacattcacctgattagagataatcggcacggccacaatcaggccataacctatcaaactgcttaaccagctcaggcgacgactccagtaacgggcgctctcgtcctgaatcgtgaacgggcgcagttccgccacgtttgggcaaaaaatcaggcgtagtacggctttgaaaaattcaatcagggcaaaggcgttgagaaacaaactttgttggaaagcgatggtgcgactgcctgcattcaggttgtcgcttaatatctggccgacaaataatgtcagtgccagtaacagcaggtcgataataaacgccccgataatcatcgccggaagctgcagccagttactgcgctcacgatttttttgccgcgcccactgacccattttgcgatacagcggcagtgcgcacaggcgaatcagccagtaaaaaccaaacactaaaaccgctaacattgaaaaatgggtcagcgcattgctgaaggtttgtggattaaacggcttatgcggggagccggtgatattgcgataaagctgcccgaagcgggcggaaagggcttcaccataatggcggctgaattcggtgaccttttgcagcacggtttgctcttcaaccagcgtcggcggcacgatcttcgggaccggttcagcaggtggcgtcgcggcgacggtgcgcaactggtcgatcaactctttacgcgaggtgtcattatccagcacatccgccagtgcgccataagccgcttttttttgttcgatatccggttccggggccggttcagtcgttgagtccgttgtcgttgtggttgtaacgccgggtatggataccgcgtgggcaggtgcgcccagcaggcagaagaggatgaacaggatccaccgcatgactcctccagtgagaaaacagagcaaaaagataagtatagatgctgggggaggggtgattttaaatgagaggaatctggtgtacctccctttcgggtgaaagggaggcagagaagttaagagacgtgctgtaaaaattcctgcaagcgctggctcggcggatttttaatcaacacttgtggatcgccatcttccgcaatccggcctttgtcgataaagatcaggcgcgaagctactttctcggcaaaaccgatttcgtgggtcacgatcaccatcgtcatcccttcttcagccagatcttgcataaccttcagcacttcatggcgcagttccgggtcaagagcggaagtcggttcatcaaacagcatcattttcggcttcaccgccagcgcgcgggcaatcgccacacgctgctgttgaccaccagaaagttcggaagggtagtgatgtgcacgttctgccagaccgactttcgccagcagctcacgtgccagtttttccgcntcttctttgttcgcgccacgcacgcgtagcgggccaaacatgacgttttccagcgccgtcagatgcgggaagaggtaaaactgctggaacaccatacctgcttcctggcgaatcaggcgctcgtcaactttcggatcgttaaccttcaggccatcgacaatcagatcgccggaggtgatttcttccagtttgttgatgcagcgcagcagggtcgatttaccggaaccggacggcccgataatcaccacganttcgccctgggcaatgttcaaatcgatattgtgcagcacctgggttgggccaaagtgcttggagacgtttttaaattcaatcacaggattttcatccttctttccagacgacgcagaataaagctcagcaccagggtaataatcagatagaacaccgccacggcgctccagatctcaagggcgcggaagttaccggcaataatttcttgcccctgacgggtcagttccgccacgccgatcacaataaacagcgaggtgtctttaatgctgatgatccactggttacccagcggcggcagcatacgacgcagtgccagcggtaaaatgacgtagcgaatggtttcccaacgtgaaagaccgagcgccagtcctgcttcacgaaaacctttgtggatagacagcaccgcaccacgcgtgatttccgcaatgtacgcgccggagttgatcatgatggtgaccaccgccgcagtaaatgggtcgatgcgtaagtcattaaacgccatcggcagggcaaaatagataaacatcacctggacgacgataggtgtgccgcggatcacttcaataaaaaccagcgcgacgtggttggctatccaaccaccgaaggtgcgtgcaaaacctgccagcaatccgatcaccaggccgccagccagaccgaggaccgatatccacagggtcattttggcaccttcaatcagaagcggaatggcaggccagatagcactccagtcaaactgcatatgttgttcctgttaccgtggtgtaaataatcaaattcagggtaattaatggccccggagcgggtttgcgccctcaccctaatcctctccccagaggggagagggaactgccagtgcgctttacaggtgtagcnnnnnntatttcggttcagtaccgaaccattttttgtagatttcgttgtaagttccgttctcgcgcagggttttcaacgcgccgttgactttgtcacgcagctcgtcgctacctttcgggaacgcaataccgtattgctgcgcttccagagagtcgcctaccgctttgaactgaccgttaccggcggttttgatgaagtacagaatgtttggcgtatcgtgcagaacggcgtctgcgcggttggtgcccagttccatataggcgttatcgatgttcgggaactgacgcagatctttagttttgatgtttgctttcgcgtaatcaacggagccagtgccgctcttcaccgcaaccactttcccgtcgagatctttcacgcttttcacatcgttattgttagctttcaccatcactaacaggccgcttttgtagtagccgtcagagaaatcgatcgcttttttacgctcgtcggtgatggtaatgcccgccagcgccagatcgacgtttttggtttgcagtgccggaatgatcccactgaaatccatcggcttcagttcgtaatccagcttcagctctttagcgatggcagcccacagatcaacgtcaaagcccacatatttatcgccctgtttaaattcaaacggaacgaaggcggtatccgtcgcgacaactaattttttatccgcggcatgagaagaaaccgcaaaagccagggtcagtgcagccagtgaaacttttaatacagacttcatagcatttccttttttctatccacgggacgatcccctgcgtgacattcacatatatgaaaaaatcgtgccagttttgcaactcattgatttttcgagatgcggtaaaaacgtgatgcacgatttatagggcaacaccctgaagatgcaccattctggggcaccaaactggtgcgctaaaattgtgcactcaacacagtgattatttagcgtaaaacctgatgaaaaaacaatctttatgtaacgattgtgtgatgatgtggatacaaaaaatttacttaatcagctggggatagcagatggatgcactaaataagtgcgttgaggcgggctgcaaaacaaaacggcctcctgtcaggaagccgcttttatcgggtactaaaattctgcaccatcagcgatggatttattcgatgttagactcgataaaccacaggaatttatccaggtcgcgagacgcggcggtcaggatatctgcggtgtcgtcatctttcgcttcgccaatcgctttgcgtacgtcattagcgacgattgcgtaacggtcagccagttctttcaggtgatcctgaacgttgtggatgtccagcgggtaacttttcagcggggttttgctgttgataacttgagtggtccccagagctacaccgcccagctgcactgcacgttctgccatggtatccagatgatcgatcagtgcagtgcggaagccatccagcatttcatgtacggcaatgaagttagcgccgcgcatgttccagtgcgcttgtttggtaatcaaagaaagatcaataaactggataacctggcgattcagcaactctactgttgcttttttctcgctgtcagagacatcgttgcgggtataaagcagattggtcgcttttgatttaactaatttagcggtactcataatttcatatcctcttgatgttatgtcccagtaattaacgagactaagtatagcaccggctatgtgttccgctattctggctgttcctatcacactaatagtggtaacaagcgtgaaaaacaaaactaataaagattcaatgagttagatatattgataagaacaattcttatttatttgctcgccaggaattttcggaataaatatgcttttgcataattcgatatataaagacggtgtagaggaaaagtagcgagaaattctgcatggttatgcataaccatgcagaaatgtaaatttaattaatgtctaattcttttattttgctctctttgcgtactgtcagcgtagaacccattgaagcggcgataattgcgccgagcgccagcagctgtatgggtgtcagtgtttctccgaggaaaatcatcccggaaacggcagccagcgccggttccatgctcatcagcgtaccaaatgtccgtgttggcaaacgggtgagggcaatcatttccagcgaataaggcagagcggtcgagagaatagcgaccgccagacccaatggaataaccgaccagtgccagagtgcttcaccagcctgaagcgctccaattggcacgaaaattaacgctgcaatcaacgaaccaattgccaccgtcgcagggccatgttccgctcctgcgcgttgcccacttaaaatgtaaatagcccaacaagccccggcccccagtgccagcgcacagccggttaaatcgacatgggaaacgtcttgccccagcggtagcaggaaccacagaccaagaaccgccagcacaacccagacgaaatctaccgggcgacgagaagagaacagcgccaccgccagtggtccggtgaactccagcgccaccgcaatacccagcggtaccgtctgaatagagagataaaaaagataattcatcccacccagcgaaacgccgtaaaacaacagcggtaaccgttgctctttggcaaagcgcagtcgccatggcttaaagaacgcgatgaggatcagcgttcctaatgccaggcgcagcgcagtgacacccggtgcgcccaccagaggaaaaagtgacttagctaacgaagctccaccttgaatagacgccatggcaacgagcaatatgactattggtaaccagaccggcattttacgtaatgaaccaggcatcctttctcccacaaatatctagacttaagtaaagcgtggagtgtactggatatacccaatgctggttgagcatttgttgaaaaaattttcccccgttttgactaaaatgcgccaggattgatggaatcattagtctggtgattaggaataatctggatgaatgacagggaaaacatgcgtaatacttacncagttctctgaaaaagtgatttaaatttagatggatagcggtgtatggaaacgttctgttacatgaaatggcccgttagacatcacaaatcgcgaagagtttcccattaatttttgatatatttaaaacttaggacttatttgaatcacatttgaggtggttatgaaaaaaattgcatgtctttcagcactggccgcagttctggctttcaccgcaggtacttccgtagctgcgacttctaccgtaacaggcggttacgcacagagcgacgctcagggccaaatgaacaaaatgggcggtttcaacctgaaataccgctatgaagaagacaacagcccgctgggtgtgatcggttcattcacttacaccgagaaaagccgtactgcaagctctggtgactacaacaaaaaccagtactacggcatcactgctggtccggcttaccgcattaacgactgggcaagcatctacggtgtagtgggtgtgggttatggtaaattccagaccactgaatacccgacctacaaacacgacaccagcgactacggtttctcctacggtgctggtctgcagttcaacccgatggaaaacgttgctctggacttctcttacgagcagagccgtattcgtagcgttgacgtaggcacctggattgccggtgttggttaccgcttctaatcactttggtgatataaaaaatccgcctctcggggcggatttttgtttttaaggcttcgggtcgaaaatatcggttccganatggttgtaatccaccttctgtaactggaagttggtgatgtatatcggcccggctttcttctcagatataaacgggtatttgatgttaatttccttcgctttaattcccgtccactgcgagaaaaagcctaagaagtcattggctgagcggcgggctttaatcacccgatgcgctttatcgtcgctggaaatgaccataaaaggcacctggaaattttgctgatacttatcatcatgggcaaggtattgcacgtctttgccgcgctctttaaaggccagaccgtggtcagaaaagtaaaccagcgagaagctgctgccgctgttgcgtaactgatcgtacagcttgcgcagtaaatcgtccgtttgcgtcatagtatagagatagcacgacgtttctttcgattgcacaaaggtttcgtatttgccttttgtccggtcgcaggcctgcggatgcgagcccatcagatgcagaacaatcagctgcggttgcgagtgctcttgcgccagcacttgagcggtcatatccagtaacgcttcgtctttcgtgtttttatctgcttcaaaattaccttctttcaggaagtacacttcatctgcacgtttggcgatgctggcgatagcagtatcgtattcgccgatttggccctggttggaaaaccaccaggtctggaagcccgcgcgatttgccagggtgacaaagttatcctgaaactgtggtttgccatcgactacgcgattgagcgttaagccaagcgatttctgcgtggagccactggcggcaatgtagtcagcaaatatcaaaccgttaacgctgctggcaaacggggtattgtcccagtgaccgccaaaggcaccgagggcatcgcgacgcgcgctttcaccgatcaccaccacataggtctgatacttcggcttaacggcagtgaccgtccaggtatctttcattccggaaagttttgccatccgttcttgctcttcaatcacctcgttattattgacgatgacatccttagcaaaacgaaataccggatagccagtatctttcagtttaaatacgccaccccaggccaggttttgcacgggagcaacaaaaaatgtcgccacactgaataccagacacaggctgtcgaaggtattccagcgcgctttttcattctctttttttcgcctgattgctattacgccgagcgcaaaaataaataagccgaccaggtagctgtaccacggaaaaatcgtcaggatttcggtcgactcttccatattggtggagtgcaatgccagcaatgtattgaaattaggcgcgccgtaggcctgagcaaaagggaaataacaagccgccaccagcgaactgacaccgaccagaactttttgtacgcgaggcaatgttcgccatagcaaaagcaaaatagccgtaaacgcagcggtgtagagcaaactgaaggggtaacntaagccgaggttaattaatagcgactgtaaaaagtagaacgcagtccacgggctaaatacccggctacgggtaacaagcgattctttgagggttaaattcatatgccactatcgtaacaaacgccatgtgcttaccctggcgtcaagggtcaatacctgcaagagtgcgtgaagaggggaaaggggtccgcatccgcgagccgcaatatacgcagggctgcaagaagatagagcgagccgcagttcaggtcaactactgacgaacaaatcttttgcgaaggggattgcaaatccgacaaaaagtggggtttttcagaccaaaacgcgtcgtgcctgcatgaaagcaggagtgaagcggcgtaccgcgacgccgctatttatcggaaggtttatcttgctgcggtttgttgttgaccatatcgcacaacatagagagcagcattaaccgtactttaaagggagaatgactaaacacgcgcatacacctcttgaactcattcataagacctcctgacttgctaatcccgtcgatccttgagggatgattgcattacatacagatatagcacangctatattatatagctattgctaaaacgttaattttttgtaccttcgcaactctggtttacaatgtgcgcacgaaatgagaacgctatgtatgcgtcaccataatgaggaagcacaatgagtcgtcgcgcaggtacgccaacagcaaaaaaagtgacgcagttagtgaacgaggaagagcacgttgaagggttccgccaggtcagagaggcgcatcggcgcgagcttattgatgattacgttgagctgatttctgacttgatcagggaagtgggggaagctcgtcaggtagacatggctgctcgtttgggagtttcgcaaccgacggtggctaaaatgcttaagcgactggcaactatggggctgattgaaatgatcccctggcgtggcgtgtttttaacggcagaaggagagaagctggcgcaggaaagccgcgagcgacatcagatagtcgaaaatttcttgttggtgttgggcgtcagtccgaaaatcgcccgtcgcgacgcggaaggcatggagcaccatgttagtgaagagacgctggatgcctttcgtttgtttacccagaaacacggtgccaaatgagcctgccttttttacgcacgctgcaaggcgatcgtttttttcagttattaattcttgttggtatcggattaagttttttcgtgccctttgcaccgaaatcctggcctgctgctatcgactggcacaccatcatcaccttaagcggcctgatgctgctgaccaaaggtgtggagttaagcggttattttgatgtgctggggcgcaaaatggtgcgccgctttgctacggagcgtcggctggcgatgtttatggtgctggcggcggcgctgctttctacctttctgaccaacgatgtcgcgctgtttattgttgttccgctgactatcacgctaaaaaggctgtgtgagatcccggttaatcggctgattatntttgaggcgctggcagtcaacgctggttcgctactgacgccaattggcaacccgcaaaatattcttatctggggacgttctggtctttcgtttgccggatttattgcccaaatggcaccgctggctggcgcaatgatgctgacgctcctgctgttgtgctggtgttgtttccctggaaaggcactccaataccatacgggggtgcaaacaccggagtggaaaccgcggctggtgtggagttgtctggggctgtatatcgtctttctgacggcgctggagttcaaacaagagctgtggggactggtgattgtggcggcgggctttgcgctgctggcgcgtcgcgtggtgttgagtgtggactggacgctgctgctggtgtttatggcgatgtttatcgacgtccatttactgacccagcttccagcgttgcaaggcgtgttgggtaacgtgagtcatttatctgaacccggattatggttaacggcaatcggtttatcgcaggtgatcagtaacgtgccgagtactatattgttgctgaactatgtgccgccgtctttattactggcatgggcggtaaacgtaggtggctttgggttattacccggatcgctggcaaatttgattgcgctacgtatggcgaacgatcgccgcatctggtggcgtttccatctctattcaataccgatgctgttgtgggcggcgctggtgggatatgttttgttggttatgatcccggcctggtaaggtctggcaaataaaaaaggcggattatgagtccgcctttgttttacgttttgaagattaattcagacgaaccggcatcccggagcggtttttaatcgcttcatcaagaacaacctggtcaacatctggctggccggtcactgtctgcacgctcttcgtcagggtaattggcacaatttcctgaccttcaaattgggcttcggtggtagacagcgggttatggacttcaatgtaacggctgccgtctggctcggtggtcgcttttaccggctcatcaataaactgtacgcgggtaccgaccggtactttctcgaacaggaatttgatgtcttcgttacgcagacgcacacaaccatgacttacacgcagaccgataccgaagttagcgttggtgccatggatagcgtacaggcgaccgatgtagagtgcatacagccccatcgggttatccggacctgccggaacgacagccggaagcggttcgcccgcagcgcggtactctgcgtgcattttggcggtcggcgtccaggttgggcctgctttcttacgctcaactttggtggtccagttgataggcgtatctttgcctaactgaccaatgccgatcggcagcacgataacggtgttggtccctttcggatagtaatacagacgcatctctgcactgttaatgacgatgccttcatgaacggtatccggcaggatcagctgctgcggaatgttcagtacagtaccgcctttcggcaggaaggtatccacacccgggttcgcttccatcatattggaaagccccatctggtactccgcggcaaaatactccagcggctgagtgttaccttcaggaatggtgatcacctgattctgaccaaccaggcgactcccgtcggttggcagaggataagttaccgcagaggcggtactgcaaaagccgacaacagcgaaggccgctgcgaataatgttttcaatttcatattcatgttaagcgagattttgtgcctggcaggccattgggttgagaatattagagtattggaagcgcattataagttcattccagctcacagtgaaatcanatgtgtacnaaatcacattttttgcctttggcttgagtgtagaccttaagcgaggagcaggatcttctttcagacttatggcataatgcgcggtttgtcatatctcttttcaggatacgcctgtgttagtttccagtaacgtcaccatgcagttcggcagtaagccgttgtttgaaaacatttccgtcaaatttggcggcggcaaccgttacggcctgattggcgcgaacggtagtggtaaatccacctttatgaagatcctcggcggcgaccttgagccgacgctgggtaacgtttccctcgatcccaacgagcgcattggtaaactgcgtcaggatcagtttgcctttgaagagttcactgtgctggatacggtgatcatggggcataaagagttgtgggaagtgaagcaggagcgcgaccgcatctatgctttgccggaaatgagtgaagaagacggctataaagtggccgatctggaagttaaatacggcgaaatggacggttactctgcggaagctcgtgccggtgaattgttgcttggcgtgggaattccagtggaacagcactacggcccgatgagtgaagttgctcctggctggaagctgcgtgtgttgctggcgcaggcgctgtttgctgatccggatattctcctgctcgacgaaccgaccaacaacctcgacatcgacaccattcgctggctggaacaggtgctgaacgagcgtgacagcaccatgatcatcatctcgcacgaccgtcacttccttaacatggtctgtacccacatggcggatctggattacggcgagctgcgcgtttatccgggtaactacgatgagtacatgacggcggcgacccaggcgcgtgaacgtctgctggccgataacgccaagaagaaagcgcagattgctgagctgcaatctttcgttagccgctttagcgccaacgcctcgaaatctcgccaggcaacttcgcgcgcgcgnnagattgataaaatcaaactggaagaggtgaaagcctccagccgtcagaacccgttcatccgttttgaacaggataagaagctgttccgtaacgcgctggaagtggaaggtctgaccaaagggtttgataacggtccgctgtttaaaaatctcaacctgctgctggaagtcggtgaaaaactggcggtactgggtaccaacggcgtcggtaaatcaacgctgttgaaaacgctggtgggcgatctgcaaccggacagcggcaccgtaaaatggtctgaaaacgcgcgcattggttactatgctcaggaccacgaatatgagtttgaaaatgatctgaccgtgttcgaatggatgaggcagtggaagcaggaaggcgatgacgagcaggcggtgcgcagtattctcggtcgtttgctgttcagccaggacgacatcaaaaagcctgctaaagtgctttccggtggagaaaaagggcggatgctttttggtaagttaatgatgcagaagccgaacattctgatcatggacgaaccgaccaaccacctggatatggaatccatcgagtcactgaacatggcgctggaactgtatcagggcacgctgatctttgtttcacacgaccgtgagttcgtaagctctctggcgacccgcattctggaaatcaccccggaacgcgtgatcgactttagcggtaattacgaagattacctgcgtagtaaagggatcgagtaagttattatccgtcaccccgatactgtcggggtgacggcggctgatgacaaacgcaagattgcctgatgcgctatgcttatcaggcattaagaaagcgcacttgtcagcaatctgagtaacgtcgaatcgattttcttaatcccacatcaattcacttcaattaactctcaaacatccatgcccaacgctcgcttaccgtgaatgttgaggtcggcaagcgtaaagcgtccttcccagtttgtttcatagtcctcgcgcgggaagtcgcccggcgatgcgcctttttccagtgcggccttcaccttgtgcgcgtaggcaagatttttctcgcacatcggtgccgcaggaatgtacatcacgttgccccaaccctgttgattttcaacgggggcaacggaatggatgacgtcgcagtgccaccagacggagtctccggcctcgagttttggaatgctggttaacgcctcaattaacagtggatgccattgctctgataccggcaacactcttccgggcgctacgccgcacagttcatcctccggcacatcatcaagcagcggacgtaacagtacgtacgccatggcttcaggaatgggcacgacgtgcagcaacccctgaccaggcagcatatcagagagcgctgtccagccctggaatgtccgaaacacggaacatttggtggtgttgtccaccgtgtactcttcaacttccgtacgatgtgccgcatgccagggatcgtatttcgccagattgccattaaagacgttagcgaaaacgtgctgatacgctggaagcagccagcgttccagcgccccggagtcggtatgcgctccaagacctttggaggtcgttccgggcggacggcggcggatacggtcagggtagatgacgctcacatccgggttaaaccattgctttccatcactttcaaatgtccacagacgattgagaaacgactgcgcattcgccatttcttcactctggcgggcctgcatttgcgcctgcgaccagtagatggggtaaatctcgggacgtgaagcgctgagcgtcccgaagaaattatcgccggggcctttgtagacctcgtcaaagcggttgcggtccagatagtccagcatcgactgatcccagcctagcgcttgttcgcgggggaaatggccttttatcaccgcacaaccgcgacgtttaatctgttcgcgctgctctgcagtaacatgacctgctttgatatcggcataagacagcaccggccagacggcatcgccctgtgctttgagtgcgttgatttcagccactcgcgtggcaatgtcatcgcttagctgattaaagatctgctggacgtcgccaagctgcgcccgcagcgcgtgcttcatctgacggatagctgctttgtgatcggcaggcaatgtgtcgctggtaaaagtagaagccataaccacctcgcattaactttcattcgaaactatgctgatttgcatgtgacaatataagttataaataagttaatgcaagtttaatgatttgatgtgatgnnnnaggatgtaaaaagaagggataaccggagcgcatggctccggtagagaggtcagctgttaaaaggggatgtgttatccagtacagcctgaatcacattcagcgcgccttcatgattattatcatcggtagcgtaacgggcgatttgtttaatgttttccgcagcattgcccatcgcaaaggaataacgcgccattttcagcatctccgcatcgttaccgctgtcgccaatcgctaccacattttgcggtgacagatcccagcgtttcagtaaccgcgaaataccgtttgctttatgtagaccgggaataatcaggtcgataaagccaaaaccactggtgacgggtttcataatgccatcgagcgctatgtgcagtttgtcgatcactaacgggatttgttcatccggcaggttgagtgaaaacttgaacagtacgtcgtcaatctcctgataatcttttacaggtttcaggcgatggtagtgttttgccatcagtgcgacaaatgcttcgggggcattttcgctgacatatgcactttgcagaccgcaggcgacaaaattgagttgcttatcttttagcaactcgccaataacaatccgcgattcatgtcgggtcagttcgccgtggaacagttgcttgccatgttcgtaaaccagtgcgccgttttccgcgacaaaagagatctcatcctttagctcaggaaagaatgaaataagctggtaatactgattaccgctggcgacaacgaactcaatgccgcgctttttcagttcctgatattgcgccataaaacgtggttggttgtacgttttgacgtcgttaagaaaagtaccgtccatatctgtgacgataacttttacgctcataggtgtgctcccggctcgaaaatgaaaccgtaacagtgtaataacaatgtgacgcagagcacaaattatatttcgaatgaaagtaaggatgaaattgatgatgtgaatgatttagcccggcgacgtctccgccgggctgaggggattacagcatatgttcggtacgggcgatgatatcgtcctgagcgtctggagagagcgcggtgaagaaggcggaataacccgcgacacgcactaccagatcgcgatactgatcgggatgttttttcgcctccagcagcgtttcgcgggaaacgatgttgtactgaatatgccagcctttatgcacttcaaagaaggtgcgcagcaggatcatcagtttctgcttgtcagattcgttctccagtgttgctggattcagtttctggttgagcaacaccccgccgagaatcgctgccgtaggcagtttacccaccgagccaatgaccgcagtagggccaagatgatcagtaccggaagccgggcttgcgccttctgccagcggggtgtgggctttacgtccgtctggcgttgccatagtttgnnnnccaaacggtacgttagcggagatagacgacgtacccgcgtaatagttgccgccaaccggaccacgaccgtagcgcgggttatggtactgtttcagttcgtcgatataggtctgataagcgcgagccagcagcgtatcgacagtatcatcgtcgttgccgtacttcggcgcaccgttaatcagccgctgacgcagctgctcgtgagtcaggccgtcgaagtcattcgccagtgcggcagccagctgttgctgactaatcgcgccctgttcaaataccagtttcttcacggccgccaggctgttgccgaggttggcaatgccaacctgcaggccagaaacccagtcatatttcgcgccgccttgcttgatacttttcgctcgctcaatacagtcatccaccagcgccgagcagagaatatcgtgcacgttctcttccagcatggtgtcgacgacatattcgatttcgattgatttacgcgtgtagtaacggatttgcgtatcccacgcgtccatcacttcatcgaagttgttgaagttacctgccgacaacgctttttcttgtggcaggaacactttgccgctggtggcatcacgcccgccttccagcgccgccagcatcacgcgggcgaagttgataaagctcatgccggtacagcgatagccccatttgccaccgacggcggtttcgatacaaccaatcgctgcatagtcgtaagcatcctgcggttcaataccgagtttaataaattccgggatgacgatttcgtcgttgttgaacgccggcatcccgaagccgcaacggatcacctgtacgcaggcgtcgaggaaatcgttgctcattcccgcgtggtaacgcacgctgaggttaggctgagtggaacgcaggcgaccgcaggattcgaggatcgcgtaagagagtggattcaccgcgtccattggttgaccatcaaccagattttgtccgccaatggtgacgttctgatacagaggacttcccgcagaggcttttgagtgtgagcctgagcggattttgttcacttccagcagtttcagccagcagctatgcagcaattcgatggcgtgttcgcgatccagtgtctggttgagttcaacgtcgcggcgatagtacgggtagagatactggtccatacgaccaaacgatactgagtgaccgttagattcgatctgcaaaatcaactggatgaagtaacacagttgcagcgcctgccagaaagtctgcggcggctggtgggcgataagatcgcagttttctgccatcgccagcagttcatcgcgacggctttcgcgggtttcggtcgcggccattgcacgcgccagggcagcgaaacgttcaatgtgttcactgactgccaccagcacgatatcaatcgctttcaggaactgttcgccgtgcagatcttccagtaccgtcagattgatgcgcgagcgacgttccgctactttctcgcgcagaccatcaagcctttttccagcagcagcgggaaattcaccgccaggtgcgcatcgccggaggtcatattgccttccgctttaatgattccggtcgccagcagacctttttgctcatcggtaaacatgccgtagcagcgatcctgtaccgtctgaccgcgccaccacgggcacacttcatgcagaacgcgtttgttctcttcgctcaccgcaaagccagcaccgggacgatctgccagatcatcaatctctttttcgatccacgagacagtatattccgggaagatcggcgcggcgcgaacttcgcttgcctggttgccgatgatcaactcatcgtgcttgatccagatagtgcgattcgccaggtgatgtgccagcgccagcgcgcgacgtacagggatcggcttatcgagatgttgttgatacatctcggtatagtgctgcgcgcgctcggtacaaaccggcggtttcacaatatgcaccagcgcatttttgtgcgctttaatgcggtcgctgagcgtgtccagtttcagtgtggtcatggttgttatcctcgtaaggtcgcggttaaccctttctggcaggcatactgctgggcaaagtcgagcagttctggcgcatcaagcggtttttccggggcgtcatagggcagattaagtaagtgatatttgttgatgcccagcgtgtggtagggcaggaaatgaatttcgccaacgtgcagctcgtcggcggcaaaatcggtaatggctttcacagaggtttcgtcggcattaaagccttgaatcagcggcacgcggataatgatttttttgcccgctgcggcgagttttttcaggttatccagcaccctggcggcgttaccgtcggtccactgtttaaacggcgcgttggcaacgtgttttaaatcggcaagaaacagatcgatatagggcagagaaggggcgatatatttccacggcacatgcaggcaggtttctaccgcagtatgaatgccggcctcgtggctggcttgcagtancgccgtcgccatttccggctgcatgaatggttcaccgccagaaagtgttaagccgccgccgctgcgatcgtaaaacggtttatcgcgcagaacggtcaccatgatctcctcaacgcttttcacttccccacacacggttaacgcctgtgtcgggcagcagtcggttaacgccgtcagatgctccggggttaacttttcccgatgaataagcaaaccattcagcgcgcgctcaatcacttccggcgcggtcttagcgcacagctcacagccttccaggcacagacgtgggtcatacagcagatcctgcgtgcgggcgcggctttccgggttctgacaccagcggcagcccagcgaacagcctttaagaaatacgaccgtgcggataccggggccatcatgggtcgagtagcgctgaatattgaaaatcatagttgcctctctgtttcgttcaaatattaaaatactttcgaatgaaagttggattgatgtgcgtcaactgttcagagagttttcccgtgatagtctacattcagacaaaaagtacattttgaggatggttatggaactgtatctggatacttcagacgttgttgcggtgaaggcgctgtcacgtatttttccgctggcgggtgtgaccactaacccaagcattatcgccgcgggtaaaaaaccgctggaggttgtgcttccggaacttcatgaagcgatgggcggtcaggggcgtctgtttgcccaggtaatggctaccactgctgaagggatggtgaatgacgcacgtaaattgcgttctattattgcggatatngtggtgaaagttccggtgaccaccgaggggctggcagctattaagatgttaaaagcggaagggattccgacgctgggaaccgcggtatatggcgcagcacaagggctgctgtcggcgctggcaggtgcggaatatgttgcgccttacgttaatcgtattgatgctcagggcggtagcggtattcagactgtgaccgacttacaccagttattgaaaatgcatgcgccgcgggcgaaagtgttagccgcgagtttcaaaaccccgcgtcaggcgctggactgcttactggcaggatgtgaatcaattactctgccactggatgtggcacaacagatgattagctatccggcggttgatgccgctgtggcgaagtttgagcangactggcagggagcgtttggcagaacgtcgatttaaccggacgttctgcatcctcataaattgctgatgacgtggcggagtgcaccgatgcctgccgcgcttggaaatctgtgcccgaaccgtaggccagataaggcgttcacgccgcatctggcgtctggagcaaatgcctgatgcgacgcttgtcgcgtcttatcaggcctggaggtggcaattactgcccgcacacctcacaccccggattgcgcatcagtttcatttcgcgaaactgacaggtcatcgcatcgtacatgacgattttcccgctggccggtttgccataacctgccagcagtttgatcgcttccattgcctgcaacgaaccaatcacgccgatcaacggtgccatcacgcctgcttctacgcaggttaacgcgttctcgctaaacaaacggctaaggcagcgatagcacggttcgccgtcctgataagtgaagaccgtgatttgcccttccatacgaattgccgcgccggaaaccagcggcaccttcgtggcaaaacagcctgcgttcagttgattacgtaccgcaacgttatccgtacagtcgagcacaagattgtgttcagcaatcaatgctgcaagttctgcgtcatccagcagtgcattgactggcgtaatcgcgatatgtgggttgatccgcgtcagagcgtcacgggcggattccaccttcggttgcccgaccgtagcatcactgtgcagcgtctggcgttgcagattcgagagcgaaaccgagtcgaagtcgagcagcgtcaggttgcctacaccggcgcttgccagatactgcgaagctgcgcagccgagtccaccgaggccgacgaccagcacacgagaatctttcagcgcctcctgaccgtcaaaatcaaaaccgcgcagaatgatttgccggttgtagcgcagcatctcttgatcgctgagttccgccattacaggcctccgaacaacgcgttaaacggttctacttccacccattcgcccacttccacattgccgcgatcgcgttccagcacgataaagcagttgccgaggctaaaggagctgaatatatgtgaaccctgatgtccggtggtcgtcacttccagttcgccatcggcgttgcggtgcagcacgccgcgctggaaatcaagacgtcctggcgtttttttcaggcgggacgctgtgcgtanncnnnnnnnnncggncaggccgctggcggtgttgccgcttagttttgccagcaaaggctgtaccagttgatagaaggtcagcgtcgctgaaaccgggttgcccggcaggccgcagaaccagctattgctgagtttaccgaacgcgaacggtttacctggtttaatcgccagcttccagaaggcgatctcccccagctcttcaagaatcgttttggtgtaatccgcttcacccactgaaacaccgccggaactgatcaccacatccgcctggctgtcggcttcaataaatgcggcgcgcagggcatgtggatcgtcgcggataatccctaagttgattacctcgcaacccagctgttctaacatcaggtgtacggcgagacggttggtatcgtagatttggccgtcgcccagcggctggcctggcaactggagttcatcaccggtagaaaaaagcgctacacgcactttacgaatcaccggaacttcggcaatccccagtgaagcaattactggcagntctgcggtagtcaggcgagtccccgctgggaaaacaaccgcacctgcagagatatcttcaccgcgacggcgaatattttgcccgctacgcacttcagcagtaaaacgcacgccattgtccgtttgttcagtctgctcctgcatcaccaccgcttcgcagccttccggcaccggcgcaccggtcataatacgaatgcaggtacccgcaggccattcaccatggtacggctgaccggcaaaggatttaccggcaacgggcagcggttgtccggaggtgatatcggccaaacgtaccgcgtaaccatccattgcggagttatcaaaccctgggacatccagcggcgaaacgacatcgctcgccagaatacgaccaaaacactgaaccagtggcagcgtttcctgggcggtcagtggggtgacgcgagaaagcatctcattaagcgcggtgtcgagcgacatcaatccggtggtaaattccatgaaaacactcctgcggaggcaaaatcgaatttgcctattatgtcagaaaaacgccacagactgtatgccacctcgggcgtagcgctgggtcctgcctttacatgccatatccatctttctatattcaaaaattgaatgagtaattcataaaaattctgatatttatagcaaaagtggcgagccacccttaatggacgaatactatgggcaaagcagtcattgcaattcatggtggcgcaggtgcaattagccgcgcgcagatgagtctgcaacaggaattacgctacatcgaggcgttgtctgccattgttgaaaccgggcagaaaatgctggaagcgggcgaaagtgcgctggatgtggtgacggaagcggtgcgtctgctggaagagtgtccactgtttaacgccggaattggcgccgtctttacgcgtgatgaaacgcatgaactggacgcctgtgtgatggatggtaacaccctgaaagccggtgcggtggcgggcgttagtcatctgcgtaatccggttcttgccgcccggctggtgatggagcaaagcccgcatgtgatgatgattggcgaaggggcagaaaattttgcgtttgctcatggcatggagcgcgtctcaccggagattttctccacgcctttgcgttatgaacaactaatggcagcgcgcgaggaaggggcaacagtcctcgaccatagcggtgcgccactggatgaaaaacagaaaatgggcaccgtgggggccgtggcgttggatttagacggcaatctggcggcagccacgtccacgggcggaatgaccaataaattacccggacgagttggcgatagccccttagtgggtgccggatgctacgccaataacgccagtgtggcggtttcttgtaccggcacgggcgaagtcttcatccgcgcgctggcggcatatgacatcgccgcgttaatggattacggcggattaagtctcacggaagcctgcgagcgggtagtaatggaaaaactccctgcgcttggcggtagcggtggcttaatcgctatcgaccatgaagggaatgtcgcgctaccgtttaacaccgaaggaatgtatcgcgcctggggctacgcaggcgatacgccaaccaccggtatctaccgtgaaaaaggggacaccgttgccacacagtgatgaacttgatgccggtaatgtgctggcggttgaaaatcttaatattgcctttatgcaggaccagcagaaaatagctgcggtccgcaatctctcttttagtctgcaacgcggtgagacgctggcaattgttggcgaatccggctccggtaagtcagtgactgcgctggcattgatgcgtctgttggaacaggcgggcggtttagtgcagtgcgataaaatgctgttgcggcggcgcagtcgtgatgtgattgaacttagcgagcagagcgctgcacaaatgcgccatgtgcgcggtgcggatatggcgatgatatttcaggagccgatgacatcgctgaacccagtatttactgtgggtgaacagattgccgaatcaattcgtctgcatcagaacgccagtcgtgaagaagcgatggtcgaggcgaagcggatgctggatcaggtacgcattccggaggcacaaaccattctttcacgttatccgcatcaactctctggcgggatgcgccancgagtgatgattgcgatggcgctgtcatgccgcccggcagtgctgatagccgatgagccaaccatcgcgctggatgtcactattcaggcgcagatcctgcaattaatcaaagtattgcaaaaagagatgtcgatgggcgttatctttatcactcacgatatgggcgtggtggcagagattgccgatcgggtactggtgatgtatcagggcgaggcggtggaaacgggtaccgtcgaacagatttttcatgcaccgcaacatccctacacccgtgcgctgttagctgctgttccgcaacttggtgcgatgaaagggttagattatccccgacgtttcccattgatatcgcttgaacatccagcgaaacaggccccccccatcgagcagaaaacggtggtggatggcgaacctgttttacgggtgcgtaatctggtcacccgtttccctttgcgcagcggtttgttgaatcgcgtaacgcgggaagtgcatgccgttgagaaagtcagttttgatctctggcctggcgaaacgctatcgctggtgggcgagtctggcagcggtaaatccactaccgggcgggcgttgctgcgcctggtcgaatcgcagggcggcgaaattatctttaacggtcagcgaatcgataccttgtcacccggcaaacttcaggcattgcgccgcgatattcagtttatttttcaggacccttacgcttcgctggacccacgtcagaccatcggtgattcgattatcgaaccgctgcgcgtacacggtttattgccaggtaaagaagcggttgcacgcgttgcgtggttgctggagcgcgtgggcctgttacctgaacatgcctggcgttacccgcatgagttttccggcggtcagcgccagcgcatctgcattgctcgcgcgttggcattgaatccaaaagtgatcattgccgacgaagccgtttcggcgctggatgtttcaattcgcgggcagattatcaacttgttgctcgatctccagcgtgatttcggcattgcgtatctgtttatctcccacgatatggctgtggtagagcggattagtcatcgtgtggcggtgatgtatctcgggcaaattgttgaaattggtccacggcgcgcggtcttcgaaaacccgcagcatccttatacgcgtaaattactggcggcagttccggtcgctgaaccgtcccgacaacgaccgcagcgtgtactgctgtcggacgatcttcccagcaatattcatctgcgtggcgaagaggtggcagccgtctcgttgcaatgcgtcgggccggggcattacgtcgcacaaccacaatcagaatacgcattcatgcgtagataacattcaggcggagaataaaatggcaagagctgtacaccgtagtgggttagtggcgctgggcattgcgacagcgttgatggcatcttgtgcattcgctgccaaagatgtggtggtggcggtaggatcgaatttcaccacgctcgatccgtatgacgcgaatgacacgttatctcaggccgtagcgaaatcgttttaccaggggctgttcggtctggataaagagatgaaactgaaaaacgtgctggcggagagttataccgtttccgatgacggcattacttacaccgtgaaattgcgggaaggaattaaattccaggatggcaccgatttcaacgcagcggcggtaaaagcgaatctggaccgggccagcgatccggcgaatcatcttaaacgctataacctgtataagaatattgctaaaacggaagcgatcgatccgacaacggtaaagattaccctcaaacagccgttctcagcgtttattaatattcttgcccatccggcgaccgcgatgatttcaccggcagcgctggaaaaatatggcaaggagattggttttcatccggtgggaaccggaccgtatgaactggatacctggaatcagaccgattttgtgaaggtgaaaaaattcgcgggttactggcagccaggattgcccaaactggacagcataacctggcgtccggtggcggataacaacacccgcgcggcaatgctgcaaaccggtgaagcgcagtttgctttccccattccttacgagcaggccgcactgctggagaaaaacaaaaatatcgagttgatggccagtccgtcaattatgcagcgttatatcagtatgaacgtgacgcaaaagccattcgataacccgaaggtccgtgaggcgctgaattacgccattaaccgtccggcgctggtgaaagtggccttcgcgggctatgcaacgccagctactggtgtggtaccgccgagtatcgcctacgcgcaaagttataaaccgtggccttacgatccagtgaaagcgcgcgaattactgaaagaggcgggatatcccaacggtttcagtaccacgctgtggtcgtcacataaccacagcaccgcgcagaaagtgctgcaatttacccagcagcagttagcgcaggtcgggattaaagcccaggtgactgcgatggatgccggacagcgggcggcagaagttgaaggtaaagggcaaaaagagagcggcgtgcggatgttctacactggctggtcggcttcaaccggcgaagcggactgggcactatcgccgttgtttgcctcgcaaaactggccaccgacgctgtttaataccgcgttttacagcaataaacaggtggatgacttcctggctcaggcactgaaaactaatgatccggcggaaaagacccgcttatataaggcggcgcaggatatcatctggcaagagtcgccgtggatcccgctggtggtagaaaaactggtgtcggcacacagtaaaaacctgaccggtttttggatcatgccagataccggcttcagctttgaagacgcggatttgcaataagcaacgcagggagtggaatgcttaattacgttatcaaacgattactggggttgattccgacgctgtttatcgtctcggtgctggtgtttttatttgtgcatatgctgcccggcgatccggcgcgattgattgccgggcccgaagctgatgcgcaggttatagaactggtgcgtcagcagctggggttggatcagccgctgtatcaccagttctggcactatatcagcaatgctgtgcagggggattttggcctgtcgatggtgtcacgtcgtccggttgccgatgagattgccagccgctttatgccaacgctgtggctgaccataaccagtatggtctgggcggtgatatttggtatggcggcgggaattatcgccgccgtctggcgtaaccgttggccggatcgattgagtatgaccattgcggtgtcggggatctcgtttccggcatttgcgctggggatgcttttaattcaggtattctccgttgaactgggctggctgcctaccgtgggagcagacagttggcagcactacattttaccctccctgacgctcggcgcggcagtggccgccgtgatggcgcgctttacccgcgcgtcgtttgtcgacgttttaagcgaagattatatgcgtaccgcgagggcgaaaggggggagcgaaacctgggttgtcctcaaacacgggctacgcaacgcgatgatcccggtagtgaccatgatgggcttacagtttggctttttgctcggtggttccatcgtggtggagaaagttttcaactggcccggacttggacgcttactcgttgactccgtagaaatgcgcgattacccggtgattcaggcggaaattctgcttttctcgctggaatttattcttatcaacttagtggtggatgtgctttacgccgccattaacccggctatcaggtacaagtaaggatgcgactatttaactggcgacgtcaggcggtgttaaacgccatgccactggtcaaacctgaccaggtacgtacaccgtggcatgaattctggcgacgatttcgccgtcagcatatggcgatgaccgccgcattattcgttattttattgattgtggtggccatttttgcacgctggatcgctccctatgacgccgaaaattattttgattatgacaatctgaataacggaccttctttgcagcactggtttggcgtcgattcactggggcgcgacattttcagccgtgtcctggttggtgcgcaaatctcgctggcggcgggcgtgtttgccgtgtttatcggtgcggcgatagggacgttgctgggcttgttggctggatattatgaaggctggtgggatcggctgatcatgcgcatttgcgatgtgctgtttgccttcccgggtattttactggcgatcgctgttgttgcggtgttgggaagcggcattgctaacgtgattattgcagtcgccattttttccatccctgcgtttgcccgcctggtgcgcggcaacacgctggtgttgaaacagcaaacctttattgagtcagcacgcagtattggtgccagcgatatgaccattttgttgcgtcatatcctgcctgggaccgtctcttctatcgtggtgtttttcaccatgcgcattggtacctcgattatctctgccgccagcctgtcatttctcggcctcggtgcgcagccgccgacaccagagtggggagcaatgctcaatgaggctcgagcggatatggttatcgcgccgcatgtcgctgtttttccggccctggctatttttctgactgtactggcgttcaatttgttgggcgatggtttacgcgatgcgctggatccgaaaattaaaggatagttacgtttgaatattgcttgaaagagtaatcacctcncaggaaattattgccctaagcaagtgttgtaactttctgctgattttgtanaatcgggtaatttggttaaatagccgcagcaagggactgtttttgcagcggcacagcgttcagacagttattttgttaaatgtattaacatgctgagtttatacgaaaagataaagataaggctgataattttatttttattggcagcactgtcatttattggcctttttttcatcattaactatcaactggtatcggaacgcgcggtaaaacgtgccgatagccgctttgaacttattcagaaaaacgttggctatttctttaaagatattgaacgttcggccctgacattaaaggactcactgtatttattaaaaaatacagaggagattcaacgcgctgtgatcctgaaaatggaaatgatgccatttttagactcggtgggactggtacttgatgataataaatattatctcttttcgcggagnnnnaacgataaaatcgttgtttatcatcaggaacaagtaaatggaccgcttgtcgacgagtcagggcgggttatttttgccgattttaacccatcgaaacgaccgtggtcggtggcttcagatgactctaacaacagctggaatccggcctacaattgctttgatcgtccgggtaaaaaatgtatctcttttacgctacgcatcaacggcaaagatcacgatttgttagcggtggataaaattcatgtcgatttaaactggcgatatctgaacgagtatcttgatcaaatcagcgctaatgatgaagttctatttttgaaacaaggccatgagatcattgccaagaatcaactcgctcgtgaaaaactgattatttataatagcgaaggtgattataatattattgattctgtcgatactgaatatatcgaaaaaacatcagcggtgccaaataacgcattattcgaaatctatttttattatccgggcggtaatttattgaacgcatcagataaacttttttatctgccgtttgcgttcattattatcgtattgctggtggtttatttaatgaccactcgtgtgttccgtcggcaattttctgaaatgacagagctggttaatacgctggcgtttttgcctgactcaacggatcagatcgaggctctgaaaattcgcgaaggcgatgcgaaagagattatcagcatcaaaaattcgatcgcggaaatgaaagatgccgaaattgaacggtcaaataaattgctctcactgatctcttacgatcaggaaagtggttttattaaaaatatggcgattattgagtccaacaataatcagtatctggctgtggggatcatcaaactgtgtggtctggaagccgtggaagctgtgtttggtgttgatgaacgcaataaaatcgtcaggaaattgtgtcagcgaattgctgagaaatatgcacaatgctgcgatatcgtgacattcaatgccgatctctatttacttctgtgtcgggaaaatgtacagacatttacccgtaaaatagcgatggtaaacgattttgacagcagctttggctaccgcaatctgcgcatccataagtctgccatttgtgaacctttgcagggggaaaacgcctggagttacgcagaaaaactgaaactggcgatttccagtatccgtgaccatatgttctccgagtttattttctgtgatgacgcgaaactcaacgaaatagaagagaatatctggattgcgcgtaatattcgccatgcaatggaaattggcgaactattcctcgtctatcaaccgatcgttgatattaacacccgcgccattctgggcgcggaggcgttgtgccgttgggtgtctgcggagcgggggatcatttcaccgctgaagttcattaccattgctgaagatatcgggtttatcaatgagctgggttatcagattattaaaacggcaatgggtgaattcagacattttagtcagcgtgcatcgctgaaggatgatttcttactgcatattaatgtttcgccctggcagttaaacgaaccgcactttcatgagcgttttaccaccatcatgaaagaaaatggcctgaaggcgaacagcctctgtgttgagatcactgaaaccgtgatcgagcgaattaatgaacatttttatctcaatattgaacaactgcgtaaacaaggggtacggatatcgattgatgactttggcaccggtttgtcaaacctgaaacgtttttatgaaattaatccagacagcataaaggtggactcgcaatttaccggcgatattttcggtactgcgggaaaaattgtgcgcattattttcgacctggcacgctataaccggatcccggtgattgcggaaggcgtagagagcgaagacgttgcgcgcgaattaatcaaattaggatgtgttcaggctcaggggtatctgtatcagaaacccatgccattctccgcctgggataaaagtggaaaattagtaaaagagtagtttacgtatgtccagaatcaataagttcgtacttacagtcagtctgctgatttttatcatgatttcagcagttgcctgcgggatctacactcaaatggtaaaggaacgggtgtatagcctgaaacagtccgttattgatactgcttttgcggtggcaaatattgctgaatatcggcgtagcgtggcaattgatcttatcaacacgctaaatcccacggaggaacagctgttggttggcttacgcacagcttacgccgactcggtttcaccctcttatttgtacgatgtcggtccttatctgatttccagtgacgaatgtattcaggtaaaggagttcgagaaaaattattgtgcagatattatgcaggttgtgaagtatcgacatgtcaaaaatacagggtttatctcttttgacggtaaaaccttcgtctattacctctatccggtaactcacaatcgtagtctgatatttttgcttggtctggagcgtttttctttactgtcaaaatcgctggcgatggacagcgagaacctgatgttctctctgtttaagaacggtaaaccggtgaccggtgatgaatataatgctaaaaacgccatcttcaccgtttcggaagcgatggagcacttcgcctatttgccgaccggattgtacgtatttgcgtataaaaaagatgtttatttgcgggtctgtacattgattattttctttgccgcattggtggcagtgatatcgggtgccagttgcctctatctggtacgcagagtgattaatcgtggtattgtggagaaagaagccattattaataaccattttgaacgcgtactggatggcgggcttttcttttcggctgncgatgtcaaaaaactctacagtatgtataactcggcgttcctggacgacctgaccaaagcaatgggtagaaaatcctttgacgaagatttaaaagcgctgccggaaaaaggcggttatttgtgcctgtttgacgtcgataaattcaaaaatattaacgacaccttcggtcatttgctgggcgatgaagtgttgatgaaagtggtgaaaatccttaaatcacagatcccggtagataaaggtaaagtctaccgcttcggcggtgacgaatttgcggtgatttatactggcggcacgctggaagagttactatcgattctaaaagaaatcgttcatttccaggtgggaagcattaatttaagcaccagtatcggtgtagcgcattcaaatgaatgtactaccgtcgaacgcttgaaaatgctggcggatgagcggctgtataagagtaagaaaaacggcagggctcagattagctggcagtagaattagaatagtgttagtacccctgaatcaaggggtactaatgaatgtggtaaatcatttgcaaacattttactttgcaaaaacttccggcccttttattgccaatgtattcaaaatacgtagtgccgggccgctcggttttatttcattacgttcccatttcgagacactttcttttgacattcccattgtatgtgccagcacggattgtgacatgccgtatcgggtgcggatggctttgatctcttcacccgtcattgatttgactttggctatacgggcgctgacttcacgggctttgaccatgacggcaatggcatcaacctcactatcagacatcaggcccagtgcattcagttcctttgcatcttccagcatcatttgtaatttatcgctcatttttcacctcaatcaagaagccagtttcgatcaaatcctctatttgcttattgctaaaggccagaaatgcatttgccatttttttgtaggctgccagttcatcatcttcgatttctttgcttcctttactgcttagaccactcttggaccaaccatcataaaaaaacacatgatttgctgatttaaaaaagataattgttctggctccaccactctttccttgttggaggggtaaccgttttttgatgacaccgctacctaaatcagcctcccatatgccttgcatcacttcttcagcggcagccatgagaactttatcgtgaataccaagttttttcgtgctttggctgaatcgccttgccttatacacacccatacatccatccttgtggtaatgtttactatagtaaccattacgcttatttcaagtaattgcgatcaaaactttaatttggtgtgaaaaagtgagagttgcctcgagtacgattcatttttctcgatttatgcgtcaggggattttgtgcgtaagggtaggacatcgggaagggtagtagaggcagatcgaagaacaatatccttgttagatctgcctttagattaattaaacccggctaccccacaaatcgtactcatcggcgtgctcgactttcacacgcaggatatcacccggcttaacgttggtttcaccattgagataaaccgcaccgtcgatttccggtgcatctgccatgctgcgaccaatcgcgccttcttcgtccacttcgtcgataatcaccagaatttcacggcccactttctcttgcaggcgctcggcggaaatctgctgctgcaactgcatgaaacggttccagcgttcttctttcacttcttccggaaccgggtcaggcagggcattggcgtctgcaccttcaaccgggctgtatttaaagcagccaacgcgatccagacgcgcttctttcaggaagtcgagtagcatctggaaatcttcttccgtctcgccagggaagccgacaataaaggttgagcgtagggtcagttccgggcagatttcgcgccactgtttgatgcgcgccagttggcgatctacagaacccggacgcttcatcagtttgagaatgcgcgggctggcgtgctgcaacggaatgtccagatacggcaggattttgccttctgccatcagtgggatgacgtcgtccacatgcggataagggtaaacgtagtgcagacgtgtccagatccccagtttcgataactgttcgcacaggctgaccatgctggtttttaccggctcgccgttgtggaagccagtacgatgtttaacatcaacgccataggcggaagtatcctgcgagatcaccagaatctctttaacgcccgcatctaccagacgtttcgcttcacttaatacttcgccaatcggacggctcaccaggtcgccgcgcatagacggaataatgcagaaggtgcagcggtgattacagccttcagaaattttcagataggcataatgacgcggcgtcagtttgacaccttgttctggcaccaggctcaggaatgggttgtgtttcggttttggcacgtagtgatgaacgtgctccagaacctgctcatagctatgaggcccggtgatttccagcactttcgggtggacttcgcggatctgatcttcttttgcccccagacaaccggtcacaattaccttgccgttttcattcaacgcttcaccaatggcttccagtgattcttgtaccgcgctgtcaataaagccgcaggtgttgacgatcaccatgtccgcatcgtcatagctcggtaccacgtcataaccttcagtgcggagttcggtgagaatacgctctgaatcgacaaggtttttcggacagccaagggaaacaaagccgattttcggctggggagttactttgctcatagcttaaaaaatattcagttacaggaaaggtcagggcagggattctacagagttctggataaaatttgtatcgcaatctcattcgctggcggaggcgaaggaaatgtaaattttgttaattcggcgtgaagaattgatcctggacagcattatgctcaaaaaatagccatactatttaattgcaacaaggctggaaagaggaggatcgaagtatgttcgttgacagacagcgaatcgatctgctgaaccggttgatcgacgcacgcgttgacctcgccgcatacgtgcaactgaggaaggcaaaaggatacatgtccgtcagcgaaagcaatcatctacgagataacttttttaaactgaatcgcgaactgcacgataaatcgctgcggttgaatcttcatctggatcaggaagagtggagtgctcttcatcatgctgaagaagcattagcgacagccgcagtatgtttgatgagtgggcaccatgattgcccgactgttattaccgtcaacgccgataagcttgaaaattgtctgatgagcttaacgctgagtatccagagcctgcagaagcacgccatgcttgagaaggcctgaaaactaagggggagaaagcgtctcccccttcatgtttaagtttttgtaaaaatgaatttgttatctcctccactgactacgctttaagccagagtcaatccggaggcgttatgcatcgacaattctttttccttgtgccccttatttgtctttcttccgctctctgggcggctcctgcaacggtaaatgtcgaagtactgcaagacaaactcgaccatccctgggcactggcctttttacccgataaccacggtatgttaatcactctgcgcggcggcgagttgcgtcactggcaagcaggaaaaggattatctgcgccgctttccggagttccggacgtttgggcgcacgggcagggcggcctgctggacgtggttttagcgcctgattttgctcagtctcgccgcatctggttaagttattccgaagttggcgatgatggcaaagccggaactgctgtggggtatggccgcttaagtgatgatctctcaaaagtgaccgactttcgcaccgtctttcgccagatgccaaaactgtctaccggcaaccattttggcgggcggctggtattcgacggtaaaggttatctttttattgctctgggcgaaaacaatcagcgcccgacggcgcaggatctggataaattacagggcaaactggtgcgtctgaccgaccagggcgaaatcccggatgataatccttttataaaggaatnnnnnnnnnncgccgagatctggtcttatggcattcgtaatccgcaaggaatggcgatgaatccgtggagtaatgcactgtggctgaatgaacatggcccgcgcggtggtgatgaaattaatatcccgcaaaaaggcaaaaactacggctggccgctggcaacctggggaatcaactattcaggctttaagataccggaagcgaaaggggagatcgtcgccgggaccgagcaacctgttttttactggaaagattcgcccgccgtgagcggcatggccttctataacagcgataaattcccccagtggcagcaaaaattntttattggcgcgctgaaagataaagatgtcattgtgatgagcgtcaacggcgacaaagtaacagaagatggccgtattttaacggacagagggcagcgaattcgtgatgttcgcactggacccgacggttatttatacgttctcaccgacgagtccagtggggaattacttaaagttagcccacgcaattagctaacgggaatcatcaccactttgcgcactgcggggcgttcagtgagttgctgataccagcgttgcagatttggacgcggtgtccaggtcaggccaacattaaacaaattgtagatgaacggtgcgatagcgatatcgcccacaccaaactcgtcgccagagaaccattttacttttgccagttccgcatcgagcagggcaaacagggcgtcgcactctttgcaactggcatcaatggcggcctgatcgcgctcttccggtggtgttctgactaatcccatcaggatcccgcgatgagcattactgagtgtctggtttgcccagtccatccatttttctgcttccgcacgacgtgccggtgagtcgatccacaggcgtttttgcccgtactgtgccgccagatagcggacaatggcgtttgattcccaaagaatgagatcactttcgtcgtcacgcaacaacggcaccagcccgttagggttcatcgccagaaaatcagcatcgtgatttatcccaaactcacggcccgcgagaatttgctcataaggtagttccagttcttcgagcgtcagcaatactttttttacgttggttgaattattccgaccccacagcgtaatcatactcaccccttttccgacaggcagccacaggctgaacaggactccgatggtgaagtaaagttaacttttaagcaacagctggcaaaaaaatgacaccagaagcagcgaagcggcaggatattgcataaactttaaaaactttaccaacttacggtttctttaagtttgtgtgtgcgttattaatcaccgaacttatcatacggcgatataacgtatttttttgaatggatactcgggtggcatttatgacgcaatactcctctctccttcgtggtcttgcagcgggttctgcatttttattcctttttgccccaacggcattcgcggccgaacaaaccgttgaagcgccgagcgtggatgcgcgtgcatggattttaatggattacgccagcggtaaagtgctggcagaaggcaatgcggatgagaaactggatcccgcgagcctgactaaaatcatgaccagctatgtggttgggcaggcgcttaaggccgataagattaaactcaccgatatggtgacggtcggtaaagatgcctgggcgacgggaaatccggcactgcgtggttcatcggtaatgttcctcaaaccgggcgatcaggtttcggtggcagacttgaacaaaggtgtgattatccagtccggtaatgacgcctgtattgcgctggccgattacgttgccgggagccaggagtcatttattggtttgatgaatggttatgccaaaaaactggggctgaccaacactaccttccagacggtgcacggtctggatgcgccggggcagttcagtaccgcgcgcgatatggcattgctgggtaaagcattgatccacgatgtgccggaagagtacgccattcataaagagaaagagttcaccttcaacaaaattcgtcagcctaaccgtaaccgtctgctgtggagcagcaatctgaatgttgatggcatgaagacaggaaccacggcaggcgcgggatataatctggttgcttcggctacccagggcgatatgcgtttaatctccgtagtgctgggggcgaaaaccgaccgtatccgttttaatgagtctgagaaattattgacctggggtttccgcttctttgaaaccgtgacgccaattaaacctgatgccacctttgtgactcagcgcgtctggtttggtgataagagcgaagtgaatctcggggcaggcgaagcgggctcagtgaccataccgcgtgggcagctgaaaaacctgaaggcgagctacacgttaacggaaccgcagcttaccgcaccgctgaaaaaaggtcaggttgtcgggaccattgatttccagcttaacggtaaatccattgagcagcgtccgctgatcgtgatggaaaatgtggaagagggcggattctttggtcggatgtgggatttcgtgatgatgaaattccatcagtggttcggcagctggttctcttaatcttctgataaccggatggcgcgaaacgtcatccggttatacgtcattaatacatcaacttaatacgctgcgtctgcgcgtacttcacatactcatcttccgggcaacaatcgctcaccacaatatcaaagcgtttcaggtcacccatgcgcgccggacgcaccttgccaaatttactgtggtcaacaaccagcacatgcttttgcgccatcgacatggcccagtgttttaccggcaactcttcaagattaaaacaggtagcgcctttactgacatgcacgcccgccgcagaataaaaagcgatatccgggcaaaaattattcagcgtttgctgaaaatcgatgggtttgaaaatggcgttgctggcgtgaaattcaccaccgcacagaaatgcgcggcaatggggtttttctttcagcgccagaaaggtatttagcgaataacaaacggcggtaaaagggatttcattatcaatcgcttcaataatccacggcgtggtggtgccacagtcaaaaaagagggtctgatcgggttctaccagtgtcgcagccagttttgccgcccggcgtttttcttccaccaggcgggatttttgatcgcttaacaggtaatggctggcgctgcgcggttccagaacaatatagccgccgagcaaaacgacgggcgcactgtggttgttcagatcgcgacgaatcgtcatctccgaaaccccaagcagggcggcggcgtctttaagatgtaacttatcgctgcgttttaattcttgcagcagctncccgatacgctcttcgcgacgtgtttccataatccctctgaatagttattgaagcgagccgctcaatactacactttttagcagagatcagtcacgcacccagcctttgcggatcggtaatgcaaaacagaagcgataccacgattgcagacgttgatagagtttatgccccatcgcttgccagataatctgggcactaaggcagccaatcatacctgccagcaatccaccgagcatatccagcggccagtggacgccaagataaacgcgcgaccaggcaatgacgacggccagcaccattaaaagtgagccggaccacaggcgatgccagcataaaaatgccagtgcaaaggtgaaaatcaccgtaccgtgatcgctcgggaatgagtcatccgccgcatgatgcaggaagttatagccgatattttcgacaaacggtcggtcgtgcggaaaaagatgtcccatcgtccaggacaccaacaggctgaccgccagcgcgatagcgatttttatcaccagttgccgttgtgctgtaagcccccacaaccaaagtaccgcggccagcagcggcaccacggtaatcaaatctttagcaataaaaatcgccaacgagatcatccacggagccgagtctggcgtcgcgttaataagagagaatagagagagattcaaattttccagcataacttcccgacgcaaagtgattaaaagggagccaatacaggcaagtcgttgagaataaagtgcaggttaaactgggtaaagcggcatcgtcttatttccctcaagcggcctgtttacggtgggtgattgtaacgggcataggttaaataaaacttaaagaaagcgtagctatactcgcaataatgtaagaatgtgcttaaccgtggtttcagctacaaaattcgctttctcgttagctgcgcttttattaaactctgcgcgattattattggcgaagaaattgcatgcaaaataaattagcttccggtgccaggcttggacgtcaggcgttacttttccctctctgtctggtgctttacgaattttcaacctatatcggcaacgatatgattcaacccggtatgttggccgtggtggaacaatatcaggcgggcattgattgggttcctacttcgatgaccgcgtatctggcgggcgggatgtttttacaatggctcctggggccgttgtcggatcgtattggtcgccgtccggtgatgctggcgggtgtggtgtggtttattgtcacctgtctggcaatattactggcgcaaaacattgaacaattcaccctgttgcgcttcttgcagggcataagcctctgtttcattggcgctgtgggatacgccgcaattcaggaatccttcgaagaggcggtttgtatcaagatcaccgcgctgatggcgaacgtggcgctgattgctccgctacttggtccactggtgggcgcggcgtggatccatgtgctgccctgggaagggatgtttgtcttgtttgccgcattggcagcgatctcctttttcggtctgcaacgagccatgcctgaaaccgccacgcgtataggcgagaaactgtcgctgaaagaactcggtcgtgactataagctggtgctgaagaacggtcgctttgtggcgggggcgctggcgctgggattcgttagcctgccgttgctggcgtggatcgctcagtcgccgattatcatcattaccggcgagcagttgagcagctatgaatatggtttgctgcaagtgcctattttcggggcgttaattgcgggtaacttgctgttagcgcgtctgacctcgcgccgcaccgtacgttcgctgattattatgggcggctggccgattatgattggtctgttggtcgctgctgcggcaacggttatctcatcgcacgcgtatttatggatgaccgccgggttaagtatttatgctttcggtattggtctggcgaatgcgggactggtgcgattaaccctgtttgccagcgatatgagtaaaggtacggtttctgcggcgatgggaatgctgcaaatgctgatctttaccgtcggtattgaaatcagcaaacatgcctggctgaacgggggcaacggactgtttaatctcttcaaccttgtcaacggaattttgtggctgtcgctgatggttatctttttaaaagataaacagatgggaaattctcacgaagggtaaaaaaatgcctgattgctttgtgcgatcaggcattctcgaattaatggtgatggtcgtcaatctggtgttcgataaccatcccttcacctacgctggcaagatggcgaacataaggatgcgggtggtaagccggagctggcgcaggagccacatagacggtttgcggcacagtcgcgacgctgaccgcttgtggaacgctgactgaatcaggaaccacaaccactttgtatccactcggcacatcgacggtgacactttgcgccatcgccacaccagtaaagcccattaaaagcgcgcccaacagtagacaatttttcataatcatttcgcctgaaataatgcagcgggttaatttccnnnnnnnatgcagccttcattcaggtattgtgttgccgggcgtgctgccgtttttattggtcaaatggcgcttcgtgtttaagaactttatcgatcacatccagtacgccttcacggttattggagcctgcccggtattttgccgctgcgacgaccgcgttgccggcattttccattgcaaaactaaagcctgcctgacgcagcatctcaatatcgttaccgccatcgccaaagaccaccacttcgctgtcgtctattccccataatttctgcagttggcgaaggccattggctttatgtacgccggggataatcagatcgatgctgccgttgccggtgtggaccggcaccataatatcgccgatggcctcatgtaatgttttttgtacttgtggaatcagttcatcggaaagattcaggccaaacttaaagaagatatcttctaagttgtcaaagttatcgacgtattccagacggtgataatacatttccgccaccattttcatggcatcgtcatattttttgagcgtataggcgctattttttccgcaggcaataatttccacttccgggcgcgtcagcaaatgttccacgacagtagtaaacgcatccttcgacagctcgccattaaaaacatctttgccttcactcactacccagccgccgttttcagccacaaaggcaatttcattagcaatttcagggaagaaagagatcaactgataatattgattcccgctggcgaccacaaagctaatgccttgtgctttcatttgctgatactgagccataaaccgctcacggttataggttttttgatcgcttaagaaagtaccatccatgtctaccgcaattaatttaatgctcatcaactattctccatcgccgtctgcgttttggtatcgggtttggcgacggctttcgcgacaatagccgcgagaataaccagcgccagtacaaccagcattgcactacgtaatccataatgttcgccgagatagcccagcagcggcggcccgacgaggaaagccagataaccggtcgttgctaccacactgacgcgggttggtgcatcggggccggtatcgctggcggcagaaatggtcagcgggaagcccagcgaggcacccagtccccagagtacaacagacaccccagcgacccaggcgctatcgacaaaaataatcagcccaatacccaacgcccccattagcgnnnnnncccgaaccacggcaacgcgactgtaacggtcgatgaaccaaccgccagtgaagcgtccaacggtcatccccagggtaaaaccggcataaatcagcgagccggaagtggggctaaaaccgtgaccgtcaaccattaataagggtaaccagtcgttggcagaaccttcggcaaaggccatcgccagcaccacaacaccaatcagcagcaactggatatcgcgataaaaaggtacgcctttttcgccatgctgggtgccatcggcagcanttttgcccgtaccgtcagggattgcctgaatggcgatatatataggcgcgatgcctaccagcgccgccaataaaatgtgcaccgttgccggaacgccaaaggccgtcagtgccatcccgacaccagcgcctgccagcgtgcccaggctataaaaaccgtgcatcatcggcaaaaccgttttattcatttctcgctcaacggcggcaccttcaacgtttatcgccacttccgcagaaccaaaacttgccccaaagacgccgagaccaacggcaaagagcaggggcgatgtcagccagagtgccagacttaatatcatcatcccgaccaatgcgcaggacatggtgaccaggatgacattacgtgtcccaaagcgtttcactaaccacgccgagcagagaataccgctcatcgaaccgatcgacagaccaaagagaacaccgcccatttcagcgatcgagacagagagaatatcgcggatagcaggcgtacgggttgcccaggacgccattaacaggcccggcaaaaagaagaacataaacagcgcccaggttcggcgtttcaatgcattacgtgaagaatttacggtcatagatcacgtcaaaataagaagagggaagacaacattagcaaggttgtgtacatttgtacacaattgcagacagaggaaatgacatgcgtcgcgctaacgatccgcaacggcgagaaaaaattatccaggccacgctggaggcggtgaaactttacggaatacatgctgttacgcaccgcaaaattgctacccttgccggggtaccgttgggatcgatgacctactatttttcaggaattgatgagttgttgctggaggcgttcagcagttttactgagatcatgtcccggcaatatcaggcattttttagcgatgttagtgatgctcaaggcgcatgccaggctatcaccgatatgatctacagctcacaggttgcaacgccggataacatggagctgatgtaccagctctacgcgctggctagccgaaaaccgctattaaaaacggtaatgcaaaactggatgcagcgcagtcagcaaacgctcgaacaatggtttgaacccggaaccgcccgcgcgcttgatgcgtttattgaggggatgacgctgcattttgtcaccgaccgtaagccgctatcgcgcgaggagattttgaggatggttganagggttgcagggtagtagataaatttcaggcaacaaaaaacccatcaaccttgaaccgaaatggcggggttgatgggctccacaaaatggggacatcaaagaaaagcagtggcactaattaagactgatgccctgcggaaaagttctgcggttgtgcaaaaaaatttcattttcagggcaacttcagttttatcctaatcctggccataccatgacgatgattgtccctgccagcgtcagcaggacgttggcgattgcgtaggtgcccgcatagcccagcgccgggatgttactacgagctgtatcactgatgatctccattgccggcgcgcaggtgcgtgcgcccatcattgcgccgaacaacagtgcgcggttcattcgcaatacataagcaccgaacaagaaacagataaccacgggcacaagactgacaatcaatccggcaatcaacatctgaccgccaatcgcgcccagaccgttattaataccgctaccggcgctcagaccaacgcctgccataaacaccatcaagccgaactctttcaccatgcttaatgccccttgcggaatgtaaccgaaggtcgggtggttagcacgcataaagcccagcataattccggcgaataacaacccggcagcgttccccatgccgaaactgaatgtgctgaactggaaggtgatcatcccgatcatcagcccaataacaaagaaggcgcagaatgccagcaggtcagtgacctggctgtgaatcgagataaagccgatgcgatcggcgatggtttttacgcggcgggcatcgccgctgacttgtaaaacgtcacctttgttaagcacgacgttgtcatcaatcggcatctcaatctggctacgaatgacgcggttaaggaagcaaccgtgatcggtcaacttcagttgtgcgagacgtttacctacagcgttatggtttttaacgaccacttcttcagtgacgatacgcatgtcgagaaggtcacgatcgaaaacttctttaccgttacggaagctgggatcgagtcgggcatgggcgtcgggatagcctaccaacgctatttcatcgcccatttgtagcacggcatcaccgtctggatttgccagaatcccgttacgtcgaatacgttcaatgtagcagccggtttgtcgataaatacccagttcacgcagatttttgccgtcggtccaggccaccagctccgggccgacgcgataggcgcggatcaccggtaaataaaccttacggttggcatcagtgtccaggccacgttcgcgggcgatttgctgggcgctggtctgtaagtcctgatgctgcaatttcggcaagtaacgcgcaccaacaatcaaactcaccagaccgattaaataggttaaggcatacccgaggctcagattatccagtgccagtgagagctgcctgctttccataccggaatgacgcagtgtatcgccagcaccgaccagaaccggtgtcgacgtcatagagcctgctaacataccggccgtcaggccaatatcccagccaaacagcttacctaaccctaaggcgatcaccagcgcactgccaaccatcaccagtgctaacattaggtaatttttcccatcgcgaaaaaaaatggaaaaaaagttcggtccggcttcgaccccgacgcagaaaataaacagcataaagccaagattaagcgcatcggtgttaatgctgaaatgttgttggcctaataacagcgatacgactaaaacgccaatggaattacccagttggatcgaaccaagtcgtaactttccgagacatagcccaagcgcgaggaccacaaataataacagaatgtaattcccatttaacaattcggcgacgtttatattcacggaggctaacttcttgtttactagtaagctgttgaaagaaatggtaatttacgataatgttttttaccagaattcagggcgcagattcattcagcgcacctaaacgatagtaaagtaacaatatattttactagtgtaatcacattaggtatcaacggctatatgaattgcgttggcctatattagcatggaatgcgaagcggctttatcttactgaacgccacactggcgaaaaatgtgttcgatagacgcagtgtcaggaggaaccgagtgaaacataaacaacgttgggcgggggcaatctgctgttttgtcctcttcattgtggtgtgcctttttctggcgacgcacatgaaaggcgcttttcgggctgccgggcatcctgaaatcggcttgctgtttttcattcttcctggagcagttgccagtttcttttcacagcgtagagaagtcctgaaacctctatttggcgcaatgctggcggcaccctgttcaatgcttattatgcggctgtttttttcaccgacccgctcattctggcaagagctggcatggttactaagcgcggtgttctggtgtgcgctgggggcactgtgtttcttatttatcagtagcttgtttaaaccacagcacagaaaaaatcagtaaagccctcaacgcgagggcttgtcagacgatcaggcgtccagattctctttcacccatgcagcaaaatcggtatagccgccgatatgttgctgatcgacaaaaatctgcggcacggtttctacgggtttacctgccttttgttgtagatcttctttagtgatcccttccgcacgaatatctacatactgatactgaaaatcatcgcgttcattgctcaatttctcagccagatcttttgcacgcacacagtaagggcaacccggacgaccaaaaataacggtttgcattatttctctcctcatagatttatgcctgtaatgatcacgctaaaatgtattcgctgaaagtaggtttaacctgttgcattaattgctaaaagctataactgttaaacacaatacagtgaaaagttttagactgaaggttcactttgcagagggaagcgtatgcgcgcgatcggtaaattgcctaaaagcgtgttgatactggaatttatcggaatgatgttgctggcggtggcgctgctgtcggtaagcgactccctgtcgctgcctgagccattttctcggccagaagtgcagattctgatgatttttctcggtgttttgctcatgcttcccgctgcggtggtggttattcttcaggtggcaaaacgtcttgccccacagctgatgaaccgtccaccgcagtattcacgttcagaaagagaaaaagataatgacgccaaccattgaacttacttgtggccatcgctccattcgccatttcactgatgaacccatttccgaggcgcagcgtgaggcgattattaacagcgctcgtgcgacgtccagttccagttttttgcagtgcagtagcattattcgcattaccgacaaagcgttacgtgaagaactggtgacgctgaccggcgggcaaaaacacgtagcgcaagcggcggagttctgggtgttctgtgccgactttaaccgccatttacagatctgtccggatgctcagcttggcctggcggaacaattgctgctcggtgtcgttgatacggcaatgatggcgcagaatgcattaaccgcagcggaatcgctgggattgggcggggtatatatcggcggcctgcgcaataatattgaagcggtgacgaaactgctgaaattaccgcagcatgttctgccgctgtttgggctgtgccttggctggcctgcggataatccggatcttaagccgcgtttaccgtcctccattttggtgcatgaaaacagctatcaaccgctggataaagacgcactggcgcagtatgacgaacaactggctgaatattacctcacccgtggcagcaataatcgccgggatacctggagcgatcatatccgccgaacaatcattaaagaaagccgcccatttattctggattatttgcacaaacagggttgggcgacgcgctaaaaccgccacgccgatgtatgatacgcgggcttttgaccaggtctgacagaaaggtgcagggtgaaaattgccatattgtcccgggatggaacgctctattcgtgtaagcggctgcgtgaagccgctatacagcgcggtcacctggttgaaattcttgatccgctttcttgctacatgaacataaatcctgcggcgtcttctattcactacaaaggccgcaagttaccccattttgacgcagtgatcccgcgtattggcaccgccattaccttttatgggacggcggcactgcgccagttcgagatgctggggagctatccgctcaatgagtcggtcgccattgcccgggcgcgtgacaaattgcgttccatgcaactgctggcgcgtcagggcatcgacctgcctgtcacgggcattgcgcattcgccggatgataccagcgatttaatcgacatggtcggtggtgcgccgctggtggtcaagttggttgaangcacgcagggaattggcgtcgtgctggcggagacgcgtcaggcggcggaaagcgtgattgacgctntccgcggtctgaacgcgcatattctggtgcaggaatatatcaaagaggcgcaagggtgcgatatccgctgtctggttgttggcgatgaagtggtcgctgcgattgaacggcgggcgaaagagggcgattttcgttccaatttgcatcgtggcggcgcggcaagcgtcgccagtatcacaccacaggagcgtgaaatcncgataaaagccgcgcgaacgatggcgctggacgttgctggtgtggatattctgcgtgctaatcgcgggccgttggtgatggaagtgaatgcgtcgccggggctggaaggaatagaaaaaaccaccggtatcgacatcgcgggtaaaatgatccgctggatcgaacgccacgctacgacagaatattgcctgaaaacgggtggttagtcgcaatcacattactgatcatggntttgcctgcgctttttgcgtaagctgtgccggtctttttatcgaaagaggttgtacaaaattatgacatcgctggtcgttcctggtctggatacgctgcgtcaatggntcgatgacctggggatgagtttttttgaatgtgataactgtcaggntntgcatntgccccatatgcagaatttcgacggtgtctttgatgccaaaatcgatctgatcgataacacgatcctgttttctgccatggcggaagtccgaccttcagccgtattgccgctggcggcggatttatctgccatcaatgccagttcgctgaccgtgaaagcatttcttgatatgcaggatgataatctgccaaagctggtggtttgccagtctttatccgttatgcagggcgtaacctatgagcagtttgcatggttcgtgcgtcagagcgaagagcagatttcgatggtcattcttgaagctaatgcccatcaactgctgttaccgactgacgatgaagggcaaaacaacgttaccgaaaactatttcctccactgataactcctttcgagcacgcagtcgctggtgcagtggctgcgcgctgcaaaattatctgctgtttttaaccttttcttaaagattattttacttctcttgtgtcgatttggctttatcacatagagcaaatacgcataaaaatttgttaaataccgttttttaatccgagctatagtctcaaaccctggctaaagttattcttgcgatgcttttatatagcgagcagtgctggccgggagagagttctcttttcttacaccgcgccgataaaaaatatgcacgtttattgcatatctttcagtgtgacaacttttgttcgtttgttaacgaactttcagaaggaaagagatatgaccgccttaaataaaaaatggctttcgggtctggttgcgggtgctctgatggccgtctctgtcggcacgctcgcggctgaacaaaaaacactccacatttataactggtctgattatatcgcccccgacacggtggctaactttgaaaaagaaaccggtattaaagtcgtctacgatgttttcgactctaacgaagtactggaaggcaaattaatggccgggagcaccggctttgacctggtggtgccgtcagcaagctttcttgaacgccagctgacagcgggagttttccagccgctggataaaagcaaattgccggagtggaagaatctcgacccggaactgctgaagttggtcgccaaacacgatcccgacaataaatttgctatgccctatatgtgggcgacgaccgggattggctataacgtcgataaagtcaaagcggtgctgggcgaaaacgcgcccgtcgatagctgggacttgatcctcaagcctgaaaatctggaaaaactgaaaagctgcggtgtatctttcctcgatgcgccagaagaagtttttgctaccgtgctgaattatctcggcaaagatcccaacagcactaaagcggatgattacaccggaccggctaccgatctgctgttaaagctgcgcccgaacattcgttatttccattcatctcaatatattaacgacctggcaaacggcgatatttgcgtcgctatcggctgggcaggtgatgtctggcaggcgtcaaaccgcgcgaaggaagcgaagaatggcgtgaatgtctcgttctcgattccaaaagaaggggcgatggcgttctttgatgtattcgccatgcctgcggatgccaaaaataaagacgaagcctatcagttcctgaattacctgctgcgtcctgatgtggtggcacatatctctgaccatgtgttctatgctaacgccaataaagcagccacgccgctggtgagtgcggaagtccgtgataacccgggtatttatccgcctgcggatgtccgcgcgaagttgttcactctgaaagtacaggctccgaaaatcgaccgtgtgcgcacccgcgcgtggaccaaagtgaagagcggaaaataatccgcagccttagatgccgggcgggagcgccactccctccggcaattcgcaccaacatggtgcgcttgcacacatttaatgccggagagcagccgtgaatgacgctatccctcgcccccaggcgaaaacccgtaaggcgctgaccccgctattagaaatccgcaatctgaccaaatcctacgatggtcagcatgcggttgatgatgtcagcctgaccatctacaaaggtgaaatctttgcgctgctgggcgcatccggctgtggcaagtccacgctgctgcgtatgctggcaggtttcgaacaaccttcagccgggcagattatgcttgatggcgtcgatttgtcacaggtgccgccttacctgcgccccatcaatatgatgtttcagtcttacgcgctgtttccgcatatgaccgtggaacagaacatcgcttttggcctgaaacaggacaaactaccgaaagcggaaattgccagccgggtcaatgagatgctcggccttgtgcatatgcaggagttcgccaaacgcaaaccgcatcagctttccggtggtcagcgacagcgtgtggcactggcccgaagccttgccaagcgcccgaaactattactgctcgacgagccgatgggcgcgctggataaaaagctgcgtgaccggatgcagcttgaagtggtggatattctggagcgcgtcggtgtgacttgtgtgatggtcacccacgatcaggaagaggcgatgaccatggcggggcgtatcgccattatgaatcgtgggaaatttgtccagattggcgaaccggaagagatctacgagcatccgactacccgctatagcgccgaatttattggctcggttaatgtctttgaaggtgtactcaaagagcgtcaggaagatggtctggtgctttattcgccggggctggtgcatccactgaaagtcgatgcggatgcttcagtggtcgataacgtgccggtacacgtagcgctgcgtccggaaaaaatcatgctttgcgaagagccgcccgccaatggttgtaacttcgcggtgggggaggtgatacacattgcctatctcggcgatctttcggtgtatcacgttcgtctgaaaagtgggcagatgattagcgcccagctacaaaacgcccatcgtcatcgtaaagggttaccgacctggggcgacgaagtgcgtttgtgctgggaagtggacagctgtgtggtgctgacggtttaaggagcaaagatgagtacacttgaacctgctgcccagtcgaaaccgccgggcggatttaagctgtggttgtcgcagttgcaaatgaagcatgggcgcaaactggtcattgcgttgccgtatatctggttgatcttgctgtttctgctgccatttctgattgtctttaaaataagcctggcggagatggcgcgcgctattccaccttataccgaactgatggagtgggctgacgggcaactgtccatcacccttaatttcggtaatttcctgcaactgaccgacgatccgctctatttcgatgcttatctccagtcgttacaggtggcggcgatttcgacattttgctgtttactgatcggctatccgctggcgtgggcggtggcgcacagtaagccttcgacccgtaatatcttattactactggtgatcctgccgtcgtggacctcgtttctgattcgtgtctacgcctggatgggaatattaaaaaacaacggtgtgctgaataattttctgctgtggctgggggttatcgatcaaccgctgaccattcttcataccaatctggcagtttatattggcattgtttacgcctacgtgccgtttatggtgctgccgatttataccgcgttgattcgtattgattattcgctggtggaagcagcgctggatctcggtgcacgaccgctgaaaacgttctttactgtgatcgtgccgctgactaaaggtgggattattgccggatcgatgctggtgtttatcccggctgtgggcgagtttgtgatcccggaactgctcggtggcccggacagcatcatgatcgggcgcgtgctatggcaagagtttttcaataaccgcgactggccggtggcctcggcggtagcgatcatcatgttgctgctgctaattgtgccgataatgtggtttcacaaacaccagcaaaaaagcgtgggagaacacggatgaataatttaccggtagttcgttcgccctggcggattgtgattttgctgttgggcttcacctttctctacgcgccaatgctgatgctggttatctattcgtttaacagctcgaagctggtgacggtgtgggccggctggtcaacgcgctggtatggcgaattattgcgcgatgacgcgatgatgagtgcggttggtttaagtctgacaattgcggcctgtgcggcgacggcggcggcgatcctcggaactattgcggcggtggtgctggtgcgctttggcaggtttcgcggatcaaatggctttgcctttatgatcaccgcgccgctggtaatgccagatgtcatcacgggcttgtcgctgttgttattattcgtcgcgcttgctcatgccattggctggcctgcggaccgcggtatgcttaccatctggctggcgcatgtcactttctgtacggcttatgtggcagtcgttatttcgtcgcgtcttcgggaactggatcgctcgatagaagaagcagcgatggatctcggtgcgacgccgctgaaagtgtttttcgtcattacgctaccgatgatcatgcccgcgatcatttctggctggttactggcttttactttgtcgcttgatgatctggtgatcgccagctttgtatccgggccgggagccaccacgttaccgatgctggtcttttccagcgtgcggatgggggtgaatccggaaatcaacgccctggcaacattgatcctcggcgcggtcggaattgtcggatttatcgcctggtatctgatggctcgcgcagaaaaacagcggatacgcgacatccagtgtgcaagacgtggctgaagacactaaaatttgccaacctggctacataatgccgcgtatgtcgcggcattgttttcatggaagacgaaacgttgggattttttaagaaaacatcttcatctcatgctcgcctgaatgtgcctgcgcttgtgcaggtgnnnncgctcgccattattatgatccgtggcctcgacgtgctgatgattttcaatacgctgggcgtgcgcggtattggcgagttcattcatcgcagcgtacaaacctggagtttaacgctggtctttttaagcagtctggtgctggttttcattgagatctggtgtgcgttttcactggtgaaagggcgtcgctgggcgcgctggctgtatctgctgacacaaatcactgccgcaagttacttgtgggcggcttcgctggggtacggttatccggagctgttcagcattcccggtgaatcaaaacgtgaaatcttccatagcctgatgctgcagaagctgccggatatgctcatcctgatgctgctgttcgttccctcgaccagtcggcggttcttccagttgcaataatgtgtataatcgtcgcccctgatgatgtgaaggtcaatgtatgcagtgcgcactttacgacgcgggtcgctgtcgttcctgtcagtggataacgcagccgattccagagcaactctccgctaaaaccgccgatcttaaaaatctgctcgccgactttccggttgaggaatggtgcgcgccggtgtcaggcccggaacaagggtttcgtaataaagccaaaatggtggtgagtggtagcgttgaaaaaccactgctcggtatgctgcatcgcgacggcacaccggaagacctttgtgactgcccgctttatcctgcctcatttgcgcccgtttttgcggcgctaaaaccgtttatcgcccgagcggggttaacgccctacaacgtggcgcgtaagcgtggcgaactgaaatacattctgctgactgaaagccagagcgatggcggcatgatgctgcgctttgtactgcgttctgaaaccaaactagcacaactgcgtaaggcattgccgtggttacaggcacaattgccgcagctaaaagttatcaccgtcaatattcagccggtacatatggcgattatggaaggggagacggagatctacctgaccgaacaacaggcgctggtagagcgttttaacgatgtgccgctgtggatccgtccgcaaagtttcttccagactaatccggcggtcgccagccagctgtacgctaccgcgcgcgactgggtacgacagctgccggttaaacatatgtgggatctgttctgcggtgtggggggctttggtttacactgcgcgacgcctgacatgcagttaaccgggatcgaaattgcgctagaggccattgcctgtgcaaagcagtcagccgctgaactgggcttaacgcgtctgcaatttcaggcgctggactccactcagtttgccaccgctcagggggaggtgccggagctggtgctggttaacccgccgcgccgcggcattggtaaaccgctgtgtgattatctctcaacgatggcaccgcgttttattatctactccagctgtaacgcccaaaccatggcgaaagatatccgcgaactgccaggttaccgcatcgaacgggtacagctttttgatatgttcccgcacaccgcgcactatgaagtgctgacgctgctggtaaaaatgtaaatacatcattcaaatcaatatcacctcggcatacatccatccaaaataataatcgtgatcgatcgattaataataaccgatcgatcacggttatatattgctctatttttgcaaatcaaatcacaaataatcaaataagatctttaattgaactgttttgattactacagtgcacttaccgaatacatacagaggcattgcttagcgaaacacaaaatttcctgagacattattaacgtcagcagaaggttcatgcattgacaacggaaatgtacgcttatggagggcgttccgacgatgtttgccaaattcatagatgttattcaaacgtttttaactgaaccggcaattttaattggtttgctggtgggtattggttatgcccttgataagaaatcgccaataaaaattattaccggcatggtcagcgccatggtgggattaatgatggtgttatttggtggtttccagttttccgcaacatttaaaccggtagcagaagccgtaagtaaagcctatggtgttcacggatatttaatggattcctacgcaatgaaagcggcaacgcaaattgcattgggggataattttggttatgtcgggtatgtatttgtactggcgttttttaccaacctgctgctggtattatttggtcggtatactggtgccaaagggatatttttgacagggaataccggtgtttcacattctcaggcggtattatggttgattgtcttttggctgggttttagctggactacatccattattattgccggaatattaacgggtgtattctgggcgttctccaccacgctcattgttaagcccattgccaaagttaccaaagatgccggttttaccattgctcataaccagatgttgggattgtggtttttctccaaattcgcccataaatttggtgaccctgaaaagcacgatgctgaaaacctgaaacttcccgggtggctggcgatttttaaccataacgtaacggctatcgccattgtgatgacgctgtttgtcggtggtttcttgctatcaacgggtatcgataatgtccagttaatggcgaaaggcaagccctggtacatctatatcatcaaccttggcttacagttctccatgtatatggtcattctgctgcagggtgtgcgcatgatggtgggcgaaattaacggttcgtttaaaggctggcaagatcgctttattcctaacgctattcctgctgtcgatgttgcagcgctgttacctttttcacccaatgccgcaacgttaggcttcgtcttctgtacttttggcaccattttttcgatggggatcttattactggttcacagcccaattatggtattgcctggctttgtacctctgtttttctctggcggtccaattggcgtattagcaaaccgcatgggcggataccgttccgtaattatctgtacgttcttgctgggtattattcagaccttcggtacggtgtgggctattccgttaaccgggcttgctgaaaatggcgtcggctggacaggaatatttgactgggcaaccgtatggcctgctatttgtgaagttctgaaatttatcgctgcaacattccatcttggtccttacgcgggttaattaaatattaagggtttaaaaatgaaagatacaattaatattctgtttgtctgtggttacggtgtaggcagtagcgttatgttacaaacggtcgttaaaaangcgctgaccaaatatgatttcaaagttgaaatggaacataccgccgcaggtgaagtcggcggatttaccgactgggcggagatttttgctatttccaaaaaattactcgatgtggttagtcttgacccgaaacaagggcaatatttgattccgatagagaatattatggacggtgaaactattggtcagcaaatttatgaagtggttcagcaacattttccgcatttaattaatcaataaggtagggcgtaatgagagcgattattctgctgttcgatagtctgaataaacgttatctgccaccttatggcgatgcgttaaccaaagcgcctaatttccaacgtctggcggctcatgccgccacctttgaaaacagttacgtcggcagtatgccgtgtatgcctgcccggcgggagttgcataccgggcgatgtaacttcctgcatcgggagtgggggccgttagaaccgtttgacgattccatgccggagctgcttaaaaaggcggggatctatacccacctgataagcgatcatttgcattactgggaagatggcgnnnnnnattatcataatcgctacagttcgtgggagattgtgcgcggacaggaaggcgatcactggcatgcaagcgttgcgcaaccgcctattcccgaggtgctacgggtgccgcaaaagcagaccggtggcggtgtttctggtctgtggcgccatgactgggcaaaccgggaatatattcagcaggaagcggattttccacaaactaaagtgtttgatgcaggctgtgcctttatccacaaaaatcacgcggaagataactggttattgcagatcgaaacgtttgatccgcacgagccgtttcacacaacggaagagtatctttccttgtatgaagataactgggatggaccgcattatgactggccgcgtggccgggtgcaggaaagcgacgaggccgtggagcacatccgttgccggtatcgttcgctggtgtcgatgtgcgatcgcaacctggggcgcattctcgacctgatggatgagcacgatctgtggcgagataccatgctgattgtcggcactgaccacggctttttactcggtgagcatggctggtgggcgaaaaaccagatgccttattacaacgaagttgccaataatccgttgtttatctgggacccgcgcagtggtgtaaaaggagagcggcgacaggcactggtacaaatgatcgactgggcgccaacgttgtatgacttttttcaacagccagtgccgcccgatgtgcaggggcaaccgctggcgaaaacggtcagtcacgatgaaccagtacgcagctcggcgatgtttggtgttttcagtggtcatgctaacgtaactgatgggcgttatgtgtatatgcgtgcagcgctgccggggcgtgaggatgatattgccaactacacgttgatgtcctgcaaaatgaacagccgctatccggtggatgagatgcgggctttatcgctggccccaccgtttcgttttaccaaagggttacaggtattacgcatcccggcacaggaaaaatataaggggttgaatcagtttggtcatttgctgtttgatctgcaaaacgatccgcagcagctacatccgattcatgatgatgtgatcgagtcccggatgatcgcgttgctgattcagttgatgaaagataatgatgcgccgccagagcagtttcagcgcctgggattagcgtagagaagtgattttgccggagtgggtgttcgcccactccggcaaatgaataattattgcgggaaccactgatcgctgatttgttgatatgtaccgtcagctttaattgctgccagcgcgttattcagtttttccagcagagctttgttatccggacgtacagcgatacccagaccggtgccaaagtattgcggatcggtcactttttcagtagcaacgcccagttgcggattggttttcagccattcattaaccaccgcagtgtcaccaaatacgccatcaatacggctatttttcagatcgataaaggcattttgataactgtcataggagaccgttttcacttccgggtgctgatcctgaatatatttctggtgcgtagtaccgttttccatcccaatgcgtttgcctttcaggtcggcaaacgttttgtaggtatcttttttggcaatcacgacggctgagttttcgtaatagggcgtggtgaacgatacctgcttgctacgatctggtgtgatatccataccggagattacggcgtcatatttcctgaatttcagtgacgggatcaggctgtcgaacgcgtgattggtaaaagtacattctgcctgcatctgtttgcataacgcttttgccaggtcgatatcaaagccgacgatctggttattggcatccatcgactcgaacggcggataggtcgctgatacgccaaaattgattttctctgcggcagaagcgccgaacgcacaggatgccagtaatgcggcaagaactaactttttcatgatggaactcccgtctgtcaatcttatgattattggccgtgtctgcggcatgggataacaatgccatcaagtgaatttatatgcaataaatatgattaaataatttgcatgaaataaaaaaagacggacaacttagtgagttgtccgtctttattataagaatttatgcactatgtaggccggataaggcgtccacgccgcatccggcacaggcaccgtgctgatgtctgatgcgacgctggcgcgtcttatcagacctacaaaacccccggcgaatgtacgcagccacattaattccttcgctcaaacgccagcgctttgcgctcgatcagacgcatcatcagcgtcagcaggccgttaacgaccagataaataatccctgccgcgccgaacaccatgacatcgtaggtgcgtccgtacaacaactggctgtatcccatcacttccatcagcgtaatggtgtaagccagagaggtacttttgaacaccagcaccacttcgttggaataagaagagagcgagcgtttaaaggcatacggcagcaggatcgccagcgtatcttttttgctcattcccagggcgctacaggactgccactgaccttccgggatcgcacgaattgcaccgtaaaacagctgcgtggtatacgccgcactgttcagcgacaacgcaatcagcgcacataaccacggttctgacaacaaatgccacagtgccggatactcctgcaacgtcgggaactgacccggcccgtaataaatcaggaagatctgcaccagcagcggtgtaccggtaaacagcgtgatataaccccgcaccagccacaccagcaccggcgttttcagcgtcaggatgatggtaaaaatcaacgccagaatcagtgccacaatcagcgaggcaacggttagcgtcaggctggtgtgcagccctttcatcagttcgggtaaatactcaaacattagctgggcctccgctcaaaacgtgtcgcgcgcaggtcaatgcgtttgagaatgtactgactgagcagggtgatcaccaggtaaatcgccgccgccacaatgtaccaggtaaatggttcctgggtacgagtagcgatgcttttggtttgcagcattaaatcattcacactaatcaaactgaccagcgcggtatctttcagcagcaccagccactggttaccgaggccaggcagcgcatgacgccacatctgcggcatcaccagacggaaaaagatagccgatttcgacagccccagcgcctggccggattcccactgacccatcggcaccgctttcaacgcgccgcgcagcgtttgcgaggcataggcggcatacagcagtgacagagcgatgacaccacaaaggaacgggctaacgtcgaagttttcaatctgcatctgcaccgggatctctacaatcccaagattgatagtgaagccatccgaaagtgtcagcagcagctgcgaggagccaaaatagataaacagcaccaccagaatttctggcaggccacgcagaatggttaccagcgctgaacctgcccacgcgacaggacgccatttcgcagactcccataccgcaaagaacatcgccagcgccagcccgacaatcaatgcacaaacggcaaggccgacggtcatcccggcggcgcttgctaaaggaaaaaattcattcatcaggaattacttctggaaccatttgttgtagatggtttcgtaagtgccatctttcttcactttttccagcgcagtgttgagtttctgctgcagctcagtgttgccctgacgtaccgcgatgccgaggccagtaccgaagtaatctttatcggtcactttatcgcccactgccgccagtttcgggttatctttcagccattcagttaccactgcggtgtcaccaaatacgctgtcgatacgaccgttttgcagatccagttttgcgttctggtagctgtcatacggcacggtggtgatttccgggtgcttatccataatgaatttctggtgagtcgtaccattctgtacgccgacttttttgcctttcagctgatcaacgctggtgtatttaccctgctgacccacaaacagggcagagttgtcatagtacggcgtggtaaacagtacctgcttttcacgttccgcggtgatatccatcccggccatcaccgcttccacgcgacggaatttcaggcttgggatcaggctgtcaaatgcctggttagagaaagtacaggtcgcatcaatctctttacacagcgcctgtgccaggtcgacgtcaaaaccaacgatctggttgtttgcatcaatcgattcaaacggaggataggaggcttcggtagcaaaacgaatggtttcggcagctgtggcggaaagactaaaacctgcaattaacgcggcaatcagaacttttttcattgttgttatcccgaatcttagtgagagagatagtttttaaatgcttcggtttgcggctcggtaaagcagctcgcgtcgccttgttctacgatatgaccgttttccatatacaccactcggctggcggttttacgcgccacttcaacttcgtgggtgacgatcacctgggtaatattcgtttctgccagctcacgaatgatgctgacgatttgtgccgtaatttccgggtccagtgcggcggtcggttcatcaaacagcagtacctgcggttccatcattaacgcacgggcaatagcaacacgctgctgctgaccaccagaaagatgcagcgggtaacgatcgctataaggtttgagacgcagacgttccagcagtttttctgcacgggccagcgcctgatctttactcaaccccagtacacggcagggcgcttcaatcaggttttgctgcacggtcagatgcggccacaggttgtattgctgaaacaccatgccaacgttacgacgcaaatcgcgaatcgctttgtctgagggtgttttggtgaaatcgaaatggttgcctgcaatgttgagcgtaccggagcgcggcatctcaagcagattgagtacacgcagcagcgagcttttacccgcgccgctggggccaagtaacaccagcgtttcgccctgtgggcaatccagcgtgatatcgaacagcgcctgatgcgcgccgtagaagcaattaatgccgtttaattgaatactcattgacactcgtatactggcagtctgatagctattgaggtcgaagatagtacctttgacagaataattatgcaatatttctgctttaaaagtnaaaagcaaagcgcattattcaataaacatagcacaaaataacgggggcggtggtcggcgagcataaatgtcggcattcctcacgaaatgccggacaatttacggggtttattggttgatcaaggcgttagcgattntcgatggactgacggagcgtacccgccgtggcatgaacgctaccgcctaagtagcgcacatcgtcgatcacccaacactggccttcctgaatcattaacanttcatcctgccagccctggtcaccctgcttgagatccacgcgcaatggaatgttacgggcatcacgattagggatagtcgatgcactggcaacgtgggcgctgtctggcaaggtggttcgactggagaacggatcactgcttaacaattcacgatgactattatcgcggctggcatcgctaagtagggttgccagtttgtcactcaaataggggcgcagggcggtaatgtcattgctgcgatgttgaatgcggtagtcatagaattgttgggccacgctgtcaggccccccctggacacaggaaccggtgcggggaccattatctttataagctggcgtgacggtggtacaggcactcagcagcagtgcacatggaataagtagagatagtgaacggtagcgcataatcatttccttattagcttgctgtctgcgtcacactacgaccaaacgctatcagattatttaatacattgtttttaatacaattctgaaacaatctgaacacctgattgggtttgagtccattgctggcgacccactcaaggttgctcgtagctgacttacttaaattacccaaacaatagacagtgtaaaccatttgtgaggttgagcgtgttatatggctgaaatgatcatttaaggtaaatatgatagttctgaaatggtggtataaatcctcctgtagaggttaagagcatctgcaagaagccagtttcacatttataacnncgtgataaatgaacgcggttattgtctaatcattacaaatttttcacatgcgataagagatcctgctattaagatgattgccaaaattacgttgtatttttgaaaatgagcgaaatttgatagtcccagctttgacttttgataatattatttatgctacagttgtgggtataaaatataatctttttgaacaagtgaatttgagctaagaataaatcaagttgtttcagtgtttcgttaattaatatgagtataaaaggtgttgtgcttttnnnnnnnnnaagcgcgaggagttcggtggattatcgtttttcttgggtgatttttaatatgataaacaatatatctgatcaagcgtcatcatttccatgcacacaattgaatcaaagtgataatttcctcgattcactgagggaatttttcgcgatattaaattccagtcgtaagggtgagttgtctacatgggataccatctacttgcatctgatattagtaataaatgctgacagtgatctcataaaaaatgatgtgttgctcgcggaaaatattccaacagcggattatcaatttaatacattttttagtaatgctttcgagactgatgttaaaaaatatctgggtaaatcagaagataacgaagttgaaataaaaacgggtaatgaaagaatctctattggaatacgtaacagatcgaatggaaaacttgaaagacaaaagtttcttttcccattggactatgagaataaattacaacatcaattagacaagcattttacgattgaatcgcacccattattatacaggcatactatgggtagtaagattgcgaatgtgatttttgnnaaattatacagtcgtattgactttaacaaagaacaatatatatcctttnnnnnggacgcgtttcttcatttttatgattatagcaggcgatatgcaattaatgaaaatattgcaaaagacgctgtaacaaacaatatcgcattgatgagcactttttatgacagtgataatacgtcaggtgaggttttaaataatgattttacagaagagtcatttgaaactgcgttagatgtagagcatacaatagtgcttggatttgctgatgataattttgaaacaaaacctgttcattatcaggatttattaacacgatttagtgcctttcaagataccgtgtttaatctgtttcctgaaatgcactcttcgcattacaacgatatttgtagcgtaagtgtggatatgacaaagggaacgcaatgcatgattcacttgatggtgaatgaagaagttttcatgtctctgcctgttccagttgccacgatggtacgtgaagatgcaagtaattgaatcaatcttaaaacactactcaatgatggttgctttattaaatatagtcattnnnnnnacgtggcattaataaagcaaaacataagtaatctctatttatcacacactgttgtgaatgaaagcatattgaaaaaatgttgttttgaaaacggcagtttaggtgatgttaaaataacaaatagcaatatagtaaataatgtattcaaaaatatttcgtttagatctgttaaaattaacaacgtaaatactcattctttaaaatttattaactgtcatttttttaatgttgatatgataagagttaatttcagcaaatgtctttttcatgactgtagcatgcatggtgtcaagataaaaccatggttgccagtaaaatggacaaaagagttaataaatgattatttgtatggctgtttactctctctgtactctatctgtgcaagagatatatataatatgaacgccgggaataacgtgaaggttgctgcggatgcttttcttgaaatactttattctcttaaaaataaatattgtattaaactattaagcgctcaggatcgggcgtttatatacgaatttgcaagaatgatcttcgcttatattaatgacaaaagcattgagatcttattactttcttgttttgcggcggcggaccaaaaagcaatccagcggtatatacctcaggcgcaagatggggaagactttaggaatcatttacaatataagttgactcttcccactcattaatgttgccggcacaacataatagggcaggtaagcggtgctccataatgaaaccaatatccggttacgaaacagataattgtacaggcttatgtagctgtttttgacacaatgagatgatttcctaaactgatcaaaaccttcttcccaacatggcatatcagtccgataatgctttagagatcgaaggcttaacaaacaaggagatcgatcatgcaattttccacaactccaactctggaaggccagaccatcgttgaatattgcggtgtggtgactggcgaagcgattttaggcgcgaatattttccgtgatttctttgctggtattcgcgatatcgttggcggacgctccggtgcctacgaaaaagagctacgtaaagcgcgggagatcgcctttgaggagcttggctcccaggngcgggcgctgggggccgatgccgtagtcggtattgatatcgactacgaaacggtcgggcaaaacggcagtatgctgatggttagcgtcagcggtacggcggtgaaaacgcgtcgatgagaagagtcttctggctgatcgctgtcgctctgttactggcagggtgcgcaggcgaaaaaggcattgtcgagaaagagggatatcagcttgatacccgacgccaggcgcaggcggcgtatccgcgcattaaagtgctggtgatccactacaccgcagatgattttgatagctcgctggcgacactgaccgataagcaggtcagctcgcattatctggtccctgcggtaccaccgcgatacaacggtaaaccgcgcatctggcaattggtgccggaacaagaactggcctggcatgcggggattagcgcctggcgcggggcaacgcgccttaacgacacctctattggcattgagctggaaaaccgtggctggcaaaaatcggcgggggtgaaatattttgccccgtttgaaccggcacagattcaggcgcttattccgctggcgaaagatattattgcccgttatcacatcaagccggaaaacgtagtggcacatgcggatatcgccccgcagcgcaaagacgatccggggccattatttccctggcagcaactggcgcagcaggggattggtgcctggccggatgcgcagcgggtgaacttttaccttgccgggcgcgcgccgcacacaccggtagataccgcgtcattgctggagcttttggcgcgctacggttatgacgttaaacctgatatgacaccgcgcgagcagcggcgcgtgattatggcgttccagatgcatttccgcccgacgttanataacggcgaagcggatgcagaaactcaggcgattgccgaagcgttgctggagaaatacgggcaggattagcgcggcagttttccgtggtcgcgcagccaggcggcagttttctcgataccttcatccagggtgatgaccggctgataacctaactcttcctgtgcccgcgtaatatccagcgtaaagtcaaaattaagcttcgagacgccgtagtgggtcagcggcggctcttttgctgacttgcggcctaaacgctccatgctgcgggcgatcatatccagcatcgggtaagggacggaacgaatacgacagtcaatattcaactcgtcgatcagcttctgcacgatgctgcgcagtgtgcgatgctcgccgttggtgatgttgtacacacgcccggaaggtagcttatcgcaggcttcctggcttgccagccacatggcgtgcacggcattttcatagtaggtcatatccaccagcgcactgccgccatgcggtaacagaatgctgccgtagtggtgcatcatatgcgcaagacgggggataaagactttatcgtgcggtccgaacagactttgtgggcgcagaatagtaaagcgcgtttgtggattcgcctgcgaaagcatattgatcacttcttcgctggccgctttgctgcgggcaaactcgttggcgaagcggtgagggcgaaaatcttctttnatatcgcgatggtggtgataatcgaagtacagggagggagaagagatatgaataaagttacgtacaccccaggcgacagcccattcacccaggcggcgagtggcgcgaacgttagccagatcgaaagcctgttgtgtcccccagggagaggtaaagctggagcagtgccacagcgtatcaatgcccgcgagcatcactttagcttgtgatgagaccagctcggtcagatccgccggaacaaactctgcgcccattttttccagcaatttacccattgcctcgttgcgaccggtcgctcgcacgctgatgcntttctggcataaaaactctaccgcgtttcgacctaagccgctggtggcgccggtaaccagtaccttcatatcaatccactgttgttgagaaaatgacgtgcgcattcttccgtgatttcccccttgatgcaatgggaaacatgaaagaataacgcaggttttgtcgattaatctgtgctttgttctgccagtctggcgattcgttttgccattccgcgaaaaataaacagatgcgcggggatcatcaataaccagtaaaacagccccggcataccgtgcggatgccagaaagcgcggacatcgatagtacgatagtcgcctttatcttccagggtaaaacacagtcgtcccagccccggtgctttcatgccaaataacaacgtaagttgtttttccggttcaacgacaatcactttccagctatccaccgcatcgccagtttgcaaatattcgcgctccggacggcctttcgctaatttatgaccgatcgcacggtccatcaacgcccgtgtctgccacaaaatattgccaaagaaataacgctctttaccgccgatttggttcaccacctgccataaagccgcaaggctggcggacgttttaacggtaaatcccgcctgtttggcaaaataaccatactctggtcgccagcgggcaaaggcctgagtgtcgtatccccagtcgctggagttgaccagcttttcttcttctttcagggtgcgacgtaccgcgtcatcgaaagcgatcagccgttgtgggatgagcgcacgtagcgcggtgtcatccgccagcagatcgtgtttcagcccctgaatcaacgccctggcggtggtgggcggtacggaagtaatcacattgagaaaccacaccgaaatccagtgggtggggagggggatggggatcaaccagcggcgcttaccgctcaccgccataaaatgttcaaactgttgctgataactgagcacctctggtccggcggcttcgaagatgcggtgttcgttggctggatggtctaacagcgccaccagatagtgcagcaagttttccagcgcgatgggcgtggtgcgtgaacgtacccagcgtggcggcgttaacactggcaggttgtagaccatatcgcgcatgacttcgaacgctgctgaacctgcaccaacgattattccggcacgcaattcggtcactggtacattcgcttcacgaagaatgtccgccgtagcctgacgcgnnnncagatggtccgactgctcatgtggcggggcctgcaacgaactgagaaagattaattgcttaactggtacttcacgtagcgcatcgcggaagttgagagccacctggcgctcctgagcgataaaatcgccgccttcgcccatgctatgcaccagaaaatagaccgtatcgatatcctgtaacagggccggaaggttatccggccagctgagatcgactttatggcaactgacgtttgccagttgcagctttgcaagcctgtcgacatgacgtgccgccgccaggatctgatgcccttgctggctgagtgtgcgcaccagatgctgaccaatgtagccactggcaccaagaactaaaatgcgttgcggcacgtctccctccttaacgcgccaggaatgcgcgccagtgggcggcgacttctgccagttgttcgcgcgagacgtcaagatgggtcaccaggcggacaatcggcgaggcgttaatcagtacgtttctcgctttcatgtattcgcctaacgcggcagcattttcttcgccgacgcgaacaaacagcatattagtgtcctgacgcatcacatccgcgcctgcttcacgcagttgctccgccatccaggcggcgttgtcgtgatcttcctgcaaccgtgcgacgttatttttcagcgcatacatcccggcggcagccagaatgccggactggcgcatcccgccacctgtcattttccgccagcgaatggcacgtttaatgtaatcacgattaccgacgagtaatgaaccgactggcgtcccaagacctttcgacaggcaaatggtgaacgaatcacaatattgcgtgatctctttcagttcgctgccgtaagccaccacggcattaaagatgcgcgcaccgtcaacatgcagcgccagattgcgctcgcgggtaaattcccatgcatctttaaggtattcacgcggcaacactttgccgttgtgggtgttttccagactgagtaatttggtgcgggcgaaatggatatcgtcgggtttgattttcatcgccactttatccagcggtagcgtgccgtcggcagccgcgtcgatgggttgcggttgaatactgcccagcaccgccgcgccaccggcttcaaacagatagttatgcgcggcctgaccgacaatatactcttcgccgcgttcgcagtgactgagcanagcgaccaggttggcctgagtgccggtaggcagaaaaatggcggcttctttaccggaaagctctgctgcatagtcctgcagagcattaacggtagggtcgtctccgtaaacgtcgtccccaaccggggcggccatcatcgcttcgagcatggcgcggctcggtcgggttacggtatcactgcgtaaatcaatcatggcatgtccttattatgacgggaaatgccaccctttttaccttagccagttcgttttcgccagttcgatcacttcatcaccgcgtccgctgatgattgcgcgcagcatatacaggctgaaacctttggcctgttcgagtttgatctgcggtggaatggctaactcttctttggcgaccaccacatccaccaataccggaccgtcgatggagaaggcgcgttgcagggcttcatcgatttcagaggctttttctacacgaatacccgtaattccgcacgcttcggcaatgcgggcaaagttggtgtcgtgcagctcagtaccgtctgtcaggtagcctccggctttcatctccatcgccacaaagcccagcacgctgttattaaagacgataattttcaccggcagtttcatctgcactaccgagaggaaatcgcccatcaacatgctaaaaccgccatcgccgcacatggcgaccacctgacgttccggctcggttgcctgcgcgcccagcgcctgcggcatggcgttagccatcgaaccgtggttaaacgaacctaacaggcgacgcttgccgttcattttcagataacgcgccgcccacaccgttggcgtgccgacgtcacaggtaaagatggcgtcatcggcggcaaaatgactaatttgctgcgccagatattgcgggtgaatggctttctcgctcggtttagctaaatcgtccagccctttgcgggcatcgcggtaatcttccagcgctttatccagaaacttgcgatcggctttttcttccaccaatggcagcaatgcacgcagggtcgacttgatatcgccgaccagcgccatatccaccttgctgtgtgcgccgatgctggctgggttgatatcaatctgaataattttggcatcggtcgggtagaacgcacggtaggggaactgagtaccgagtagcactaacgtgtcggcgttcatcatggtatggaaacctgacgagaatccgattaacccggtcattccaacatcatacggattatcgtattcgacatgctctttaccgcgtagggcatgaacaataggtgctttaattttcccggcaaactcaactaactctttatgcgnccccgcgcagccgctgccacacatcagagcgatattgctggaataacgcagcagttgcgccagtttgcgtaactcttcttcttccggcgtcacgactggctgtggcgcatgataccagtgggtagttgccccttctggcgcaggttttaacgccacgtcgcccggtaacacgacaacggaaacgccacggttaagcaccgctttgcgcatggcaatcgccagcacttgtgggatctgctccgggctggaaaccagctcgcaatagtgactacattcgcggaatagctcttgtgggtgggtttcctggaaatagccgctgccaatttcgctggaaggaatatgagcggcaatcgccagtaccggaacgtgattgcggtggcaatcgaacaggccgttgattaagtgcaggttgccggggccgcacgatccagcacagaccgccagttctcctgaaagttgtgcttcagcgccagcggcaaacgccgccacttcttcatggcgggtggacatccantcgatggtgcccatgcgattaagactgtcgctaagaccgttcagagagtcgcccgtgactccccagatgcgtttcacgcctgccgattcgagtgttttggcgatataagctgcaaccgtttgtttcatggttctccatctcctgaatgtgataacggtaacaagtttagttcatctgacggagggggaagggatgggagagaaaggaggcactaacggttaaatagcccgatgaaaggaatatcatcgggcataaggcgattatgcgagaaccaaatccccctgcggatggcaggagcaggccagtacgtaaccttcagcgatttcggcgtcggtcagtgtcattgtactgctcaccgtatattcaccggaaaccactttcgtcttacagcagccgcaaacacccgcgcggcaggcggcgacaaccggaacgttattgctttccagcgcctccagcagcgtggtgccaacaggagcgtaaaattcttgcgccggttgcagtttggtgaatttcagaccgctggtcgccgcttccgctactggggtgaagaatttctctttaaagaaacgcgtcacgccgagtgctttcacttcctgctctacccaatccatatacggagccgggccgcaggtcatcacggtacgtgaagctaagtcaggaacgcgagtcaggagttcgcgagtgagacgaccagcgataaagccttcggtaacgttattttccgccaccagcgttaccggatagttacgccactcatcggcgaaaataacatcctgcggcgtacgcacgttgtagatcacccgcacattggcctgtggacggttcttcgccagccagcgacgcatcgacataatcggcgtgacgccgcagcctgcagccagcaacaggaatttatcttctgctttatcgtcgcaggtaaattcccccatcgcgtctgaaagccagagataatcaccgcgttttacatcgcgggtcagccactgggagccgacaccgtcatcaatccgccgcacggtcagggtgatatattcactcacgcctagcgtggaggaaatggtgtaagcacgcagcgtttccgctgagttacgcacgctgaccagtgcatattgcccggcgcggtatgggtagtaatcgtggcaaatcagggaaatcgtccacacatccggcgtttcttgcttaatgtgatgaacctgcatccgccacgggcattgattcgttggcatcgtcatcgacaaactccttacgcgctcaacagttgcttcatgtcttcttcaacagtggtgatagaacgcaggccgaatttctcgttcagcaccgccagcagatctggtgtcaggaaaccaggtgcattcgggccggtgacgatatttttcacgcccagagaaagcagcgtcagcagaatgacaatcgctttctgttcaaaccaggagagcaccagcgacagcggcagatcgttgacaccgcagcccagtttttctgccagcgtaaccgccagaataattgctgagtaagcatcgttacactgaccggcatccaccagacgaggcagaccttcgatatcgccaaactcaagtttgttaaagcgatatttaccacaggcgagagtcaggatcaggcagtcatccggcacgctggtggcgaaatcggtgaagtagtgacgttcgccgcgtgcgccgtcacagccaccaagcaggaagatatgacgcagtttttcacggctcaccagatcaattagcgtatccgctgcgccaagcagcgtctggcggccaaagcccacggtgatcaggtgcggaatttcgctgtatgggaagcctgccatttgttgcgcctgggcaatgaccgcagagaaatcttcgccatccagatgacgcacgccaggccagccaacgatgctgcgggtccagatacgatcgtcataagcgcctacggttgggtcgatgatgcagttcgaggtcatcacgatggggccagggaaacgagcgaactccacttgctgattctgccagccgctgccgtagttaccgaccagatgcttgaatttacgcagctccgggtagccatgcgcaggcagcatttcgccgtgggtgtagacattaacgcccgtgccttcggtctgttccagcaggttgtagagatctttgagatcgtgaccggaaatcaggatgcatttacccgccgtcgctttgacgttgacctgggttggcgtcgggtgaccgtatttaccggtttcgcctgcatccagaatgctcatcactttgaagttcatctggccgatttccattgaacactcaagaagcgcgttcatatcggcaggccaggtccccagccacgccatgattttatgatactgggcataaatatcgttgtcgtattgaccgagaacgtgtgcgtgttccatataggccgccgcacctttcaggccatacaggcacagcagacgcaggccgagaatgttttcgccaatcgccgctttatctttgttaggggtaaattctgctgcctgacgttgcagttcgccgagatcgtcgctcaccagttgcaggtcagccatcgggttatcgacgcgggcgttggcatctacagccaggcattgtgctttcagcgcctcgcgcaaggcaatcgcttcacgagcgtagccgacaatacgcggagaatcgaagttaacgttggtcagggttgagaaaaaggcacgtggcgcgaagctgtcgacatcgtggttgatgatgccgtattcacgcgcttttaccgcccaggcagaaagcccttgcagcgccgcgatgagtaaatcctgaaggtcagaagtttccgccgttttaccacacatcccctgcgcgtatgagcagccgtttcctgccggagtacggatagtttgttcacattgcacacaaaacatgatcacaccttttaaagttatatttaatatacatgtttaaggttaagacgcttaacgcggggataaaagggatttttcatgcaactttaagggagattgatttagcgcaattttggcggcagggatctaccgccagagaggtattacgcggagaaaaaggcgatgaggatcggcactaacaggctaagaataaaaccgtgaacaattgccgccgggaccatatccagcccgccagtacgttgaagaacgggcagggtgaaatccatcgacgtcgcaccgcataagcccagtgcggtagagcggctgcggcgaatcagcccagggatcaacataattgcaatcagctcacgggccagatcattaaaaaacgccgcgctcccgattaccggaccaaaagattcggtcaataaaataccggaaagagaataccagccgaaaccagaggccattgccagcgcggtattgatgggtagatcaagaataaaggcgttaattaaaccaccaattaatgaactggcaaccaccaccacggcgacaatcattccccggcgattaaggacaatctgctttaaggtcatgccattattgcgcaactgaataccgacgaggaaaagtagcagaattaacgtgtattcactggcttcggtcgcgtgttgtaagaaagccagtccactcaggccaatggcaaaaccaatcactactacgccgcacagttttagcgactcaagcgccatcgcaatacgcgacgggagtttttcttgctgatggtggttgcgccacggcagaccgcgctccagccacataagggcggcaatattacacagtaaaataacggtaatactgacggcagaataatgcagaatcgccaacaggttactggcgaggttatcgagaaacgccagactgatacccataaaaaagagaataaggtaaaccatccagcttaatagctgattaataacttttaacgcagcttgttggcgaagcggaatgaggtaacccacaatcaggggaaccagaatgattaacaacccagaaaacatgaaaacccagcccttgcaaagaaagaagtcgaaatgcgcgatgacacactactgaaagcggaaggacgagtaaagttgcaattaaaaggaaatgttatgcatcagagggggatttttaattttatatgagtgtttagcattgttgcgctcctttcatgtgcaatgccatataaagccactggcgcagggagcgcgcaggggnnggccagnngccgccgccccctgcacccccgggctctggcgaacaaaatcgccgctgcgcggtaccttcagcttatccccttcggcaaccgggtcgggcgcgaggtaacgtcctgtaagacgcgccctcagcccacatccatgtgggctgccccggccttcggggaacgcttcagcgattttgacgccactaatacccgtgcggtttgtaatgtcgaagataaaacaaccagggcagataaaatgccaatgctaattaattacgcttttccagcagagtccggtaaatcagaccaccgataatgccaccgacaattggcaccacccagaagaaccacagttgttctaatgcccagccgccctggaagatggcaaccgcggtgctgcgcgccgggttaacagaagtgttagtcaccggaatactgattaagtgaatcagggttaaggccagaccaatagcgatcggcgcaaaacctgccggagcgaatttgtcggttgcaccgtggatcactaacaggaagcccgcactcaataccagttcaactaccagcgcggaaagcatggaataaccgcctggtgaatgctcgccataaccgttagaagcaaaaccgctggctgccgcgtcaaaacccgttttaccactggcaattaaatacagcagcgctgccgcaacaataccgccgacaacctgggcaattacgtagccaacgacttcttttgccggaaaacgtccgccagcccataaaccaatagtgaccgccgggttaaaatgaccaccagaaatatgaccaacagcaaaggccatcgtcagaacggtcagaccgaacgccaacgccacgccggcaaaaccaatgcctaattccgggaagcctgcggccagtacagcactaccacagccaccaaaaacaagccagaaagtaccaaaacattcagctgctaattttctgaacatatccacctcaattaaaaattgaccctgtgaaaaatatggtcgttttatagggtcgtcgtaaaaaagtgacgacggaaataatgcgcggctattttaaaaacgaaggcgagtcattcaccagataaataaatccagtaaatttgatttagggcaacagcgggttgccccatatagtcatttgtctgattgacagtgtagtgcaagcaaaagatttaatcctttaggcgtaataaaaaataatttatcatgctaattatttgattttgttgtttttgcagacttatcagcaagagggagtataacgcgattattcgctcatttttcagacatttgccatgcttaaatgtgatgtcatcacgtattagcaaggcctttcccgttatactgccagcgtaaaggataagtcacatatttctggaggggatatgattcttgagcgcgttgaaattgtgggttttcgcggtatcaaccgtttgtcgttgatgctggaacaaaacaacgtcctgattggggagaacgcgtggggtaaatccagcttgctggacgccttaaccctgctgctatcgccagaatcagatctctaccattttgagcgcgacgatttctggttcccgccgggagatatcaacgggcgagaacatcatctgcatattattttgaccttccgcgaatcgctgccaggccgacatcgggttcgccgttatcggccgctggaagcgtgctggacgccatgcaccgatggctatcaccgtattttttatcgtctggaaggggagagtgcggaagacggcagcgtgatgacactgcgcagttttctcgataaagacggacatccgattgatgttgaggatattaacgatcaggcacaccatctggtgcgtttaatgccggtgctgcgcttgcgtgatgcccgttttatgcgccgtattcgtaacggcacggtgccaaatgtccccaatgtggaagtcaccgcgcgccagctcgatttcctcgcccgtgagttgtcctcacatccgcaaaatctctctgatggacagattcgtcagggactttccgcaatggtgcagttgcttgagcattatttctctgagcagggggctggacaggcgcgatatcgtttaatgcggcggcgggccagcaatgagcaacgaagctggcgctatctggacatcatcaaccggatgattgaccgacctggagggcgctcgtatcgggttattttgctcggcctgtttgctactttattgcaggcaaaaggcacattgcgactggataaagacgcccgtccattgttgctgatcgaagatccagaaacgcgtttacaccccattatgctttcagttgcctggcatctgttgaatcttttgcctttacaacgtattgctaccaccaactctggcgagctgctttcgttaactccagtggaacatgtttgccgcctggtgcgtgaatcttctcgtgttgccgcctggcgtctggggccaagtggcttgagcaccgaagacagccgccgcatctcttttcacattcgttttaatcgtccgtcatcgctgtttgctcgctgctggttgctggtggaaggggaaacggaaacctgggttatcaatgaactggcgcgtcagtgcggacatcattttgatgccgaagggatcaaggtcattgagtttgcccagtccgggctaaagccactggttaaatttgcccgccgaatggggattgaatggcatgtactggtcgatggcgatgaagcagggaagaaatatgccgctacggtacgcagcctgttgaataatgatcgggaagccgaacgagaacatttaacggcgttaccggcgctggatatggaacattttatgtatcgccagggattttccgatgtgttccaccgcgtggcgcaaatcccggaaaatgtcccgatgaatctgngcaaaattatctcgaaagcgatccatcgctcttccaaacccgatcttgccattgaagtggcaatggaggccggacgtcgtggtgtggactccgtaccgacgctgctgaaaaaaatgttctcacgcgtgctgtggctggcgcgcggtcgcgcggattaaccgcgaaacatcgtggccatttgtggctgaatagcgtcgagcatctcatagcgccgacggtattcagcccgttttttactggcgatttcggcaatctcttttcgtgctatctgtgctggaaggcggtaatggcgttcagcatcacatacgccgccaaccgattcccagaaagcgttgtaatcggcatggatcttgccttctttatcgcgataacgcaggctgcggtaaatatgcgtttcattgctgacggcaataatctgctctacctgcaaacgttgggcaaacagacaggccgcttccatcacgaggcgtttgggaaatagcccgtggcaggctttcgtcgcattctggatttcctgatgtggaatttcccattttgcgccttgcagtccaccaataaacatcgttcttttcccctgatattcacacagggtaaacgtgatttctgccagaggaataccttcgctgttgcggaacaggattgtgctgtcaccttctttatccattgagatcatcatggtcagctcaagcgtgaactgctcgccgtttttgccttccagcttcgccagttgcagcccgggggtattcaaatataagctgaattcttccgccgacatacatccacggagtaacgcataatggtaacgtaacgcctccagcaattgcttacggctaagattcgccgcaaggtaagggcgatgcagacgcacaggcagtcgcggctggcgcgttaacaatacattgagattaggccagtgggaaagttcgttcatccactcaacgcttaaacgcggcataatcaacgagcgcagcaaaaatttctggcgaaaactacggcgatgccagaatttacccggccgacactgtccacgtgccagactaagaaaaagtgacaggctgctgagagattcagatgacgtaaaggtccgttcggttagctgcgacatattcatgaaatcaatggttgtacatgacgtcgatttcaccattgcgtatcttaaccaaacatcaatagtgtgattactaacgtaaattttagggttttgttgatatttcgttgaagttaatgacccggattggcatatggagtattcagaatatttatgaaaaagcggaaaaccgtgaagaagcgttacgttattgcgctggtgatagtcatcgccggactgattacgttatggagaattcttaacgcacccgtgccgacttatcagacactgattgtgcgccccggtgatttacagcaaagcgtgctggcgaccggaaagctggacgcgctgcgtaaggttgacgtgggcgcgcaggtcagcggtcagttgaaaacgctgtcggtggcgattggcgataaagtaaaaaaagaccagcttttaggggttattgatcctgaacaggctgaaaaccagatcaaggaggtcgaagcaacgctgatggagctacgcgcgcagcggcagcaggcggaagcggagctgaaactggcgcgggtgacgtattcccgtcagcaacgtctggcacaaacgcaggcggtttcactgcaggatctcgacaccgccgcgacggagatggctgtgaaacaggcgcaaattggcaccattgacgcgcaaatcaagcgcaatcaggcttctctcgatacggctaaaaccaatctcgattacactcgcatcgttgccccgatggccggggaagtcacgcaaatcaccactctgcaaggccagacggtgattgccgcacaacaagcaccgaacattctgacgctggcagatatgagcaccatgctggtaaaagcgcaggtttctgaagcggatgtaatccacctgaagccggggcaaaaagcctggtttacggtacttggcgatccactgacgcgctacgaggggcaaatcaaggatgtactaccgacgccggaaaaggttaacgacgctattttctattacgcccgttttgaagtccccaaccccaatggtttgctgcggctggatatgactgcgcaagtgcatattcagctcaccgatgtgaaaaatgtgctgacgatccctctgtcggcgttaggcgatccggttggcgataatcgttataaagtcaaattgttgcgtaatggtgaaacacgcgagcgtgaagtgacgattggcgcacgtaacgataccgatgttgagattgtcaaagggctggaagcgggcgatgaagtggtgattggtgaggccaaaccaggagctgcacaatgacgcctttgctcgaattaaaggatattcgtcgcagctatcctgccggtgatgagcaggttgaggtgctgaagggcatcaccctcgatatttatgccggtgagatggtagcgattgttggcgcttcgggttccggtaaatcgaccctgatgaatattctcggctgtctggataaggccaccagcggcacctatcgcgtcgccggtcaggatgttgccacgctggacgccgatgcgctggcgcaactgnnnngcgagcatttcggctttattttccagcgttaccatttgctttcgcatttaaccgccgagcagaacgttgaagtaccagccgtctatgctggtcttgagcggaaacagcggctgcttcgcgcccaggagttgctgcaacgactggggctggaagaccgtacagagtattatccggcacagctttcgggtggtcagcaacagcgcgttagcatcgcgcgggcattgatgaacggcggtcaggtaattcttgccgatgaaccgaccggcgcactggacagccattcaggcgaagaggtgatggcgatcctgcatcagctgcgcgatcgcgggcatacggtgattatcgtcactcacgatccgcaggtcgctgctcaggccgagcgggtgatcgaaattcgcgacggcgaaattgtgcgcaatcctcccgccattgaaaaagtgaatgttgctggcgggacggaacctgttgtcaacacggcgtctggctggcggcagtttgtcagcggttttaatgaggcgctgacgatggcatggcgggcgctggcagcgaataaaatgcgtactttactgaccatgctggggattataatcggtattgcgtcggtggtttccattgtcgtggtgggcgacgccgccaaacaaatggtgctggcggatattcgttctattggtacgaatactattgatgtctatcccgggaaagattttggcgatgacgatccgcaatatcaacaggcgctgaagtacgatgacttaatcgccatccaaaaacaaccgtgggtcgcttcagccacacctgccgtctcgcaaaacctgcgcctgcgttataacaatgttgatgttgctgccagtgccaatggcgtgagcggcgattattttaatgtctatggcatgaccttcagtgaaggaaacacctttaaccaggaacagctgaacggtcgtgcgcaggtcgtggttctcgacagtaatactcgccgccagcttttcccccataaagcagatgtggttggcgaggtgattctggtcggcaatatgcccgccagagtcattggtgtggcggaagaaaaacagtcgatgtttggtagcagtaaagtgctgcgtgtctggctaccttacagcacgatgtccgggcgagttatgggccagtcgtggctgaactccattactgtcagggtgaaagaaggatttgacagcgccgaggcggaacagcaactcacgcgtttactttcactgcgccacggtaagaaggatttctttacctggaacatggacggcgtcttgaaaaccgttgaaaagaccacacgtactttacaactgtttatgacgctggtggcggtgatttcgctggtagtgggcggtattggtgtaatgaatattatgctggtgtcagtgaccgagcggacgcgggaaattggcattcgcatggctgtaggtgcgcgagcaagcgatgttttgcaacagttcctgatcgaagccgtactggtttgcctggtcggtggcgcgttgggaataacactgtcactgttaattgctttcaccttgcagcttttcttacccggctgggagattggtttttcaccgttggcactgctgctggcgtttctctgctcgacggtcaccgggattttatttggctggttacccgcacgaaatgcggcacgactggatccagtagatgctctggcacgagagtaatttttgagataaaaatgccagccgatcgggctggcattttgcctttaggatgtacacaatgagacagaagagctatgcgactgccgcttctacttcgacgggcacaataacactggcgtgattgccttttggcccctggtggacatcaaactgaacggattgtccagcttttagcgttctgtaaccatccatctgaatggtggaataatgagcgaaaatatcttcgccgccgccttcagggcagatgaaaccaaaccctttggcattgttgaaccacttaacagtacccttttccatgcttcgacatccttcgcaaatcttatacaagtaagatggaataaaccggggtcagagagggggctgttcaaaacctcgccaactctagaaatacaatttagagaattagggcgagccgtcaagcatttgacaggggacagggggcaggtatgaatcaaaaatttgaagcagttaacgctattgacaggaatgtgacagatgtcgctgatgccaacgatagatgatagttatctatcatgtggagtagattggtcaggcaaataagctcttgtcagcggcagggcgttctgccgataaccgtaaccgaagatgataactgacaatgggtaaaacgaacgactggctggactttgatcaactggcggaagaaaaagttcgcgacgcgctaaaaccgccatctatgtataaagtgatattagtcaatgatgattacactccgatggagtttgttattgacgtgttacaaaaattcttttcttatgatgtagaacgtgcaacgcaattgatgctcgctgttcactaccaggggaaggccatttgcggagtctttaccgccgaggttgcagaaaccaaagtggcgatggtgaacaagtacgcgagggagaatgagcatccattgctgtgtacgctagaaaaagcctgaatgcaggcataaaaattgggggaggtgcctatgctcaatcaagaactggaactcagtttaaatatggctttcgccagagcgcgcgagcaccgtcatgagtttatgaccgtcgagcacttgttactggcgctgctcagtaacccatctgcccgggaggcgctggaagcgtgttctgtggatttggttgcgctccgtcaggaactggaagcctttattgaacaaaccacacccgttctgcctgccagtgaagaggagcgcgacacacagccgacgctgagttttcagcgtgtactgcaacgtgcggtcttccatgtccagtcctccggtcgcaatgaggttaccggtgcaaacgttctggtcgctatctttagcgaacaggagtcgcaggcggcatatctgttgcgtaaacatgaagtcagccgtctcgatgtggtgaactttatctctcatggcacgcgtaaagacgagccgacacagtcttctgatcctggcagccagccaaacagcgaagaacaagctggtggggaggaacgtatggagaatttcacgacgaacctgaatcagcttgcgcgcgtgggcggaatcgacccactgattggtcgtgagaaggagctggagcgtgctattcaggttctctgccgtcgccgtaaaaacaacccgctgctagtgggggaatctggtgtcggtaaaaccgcgattgcagaaggtcttgcctggcgaattgttcagggcgatgtgccggaagtgatggctgactgtacgatttactctctcgatatcggttctctgttagcgggcacaaaatatcgcggcgnnnnnnanaaacgttttaaagcgttgctcaagcagctggagcaggacactaacagcatcctgtttattgatgagatccacaccattatcggtgcgggtgcagcgtctggtggtcaggttgatgcggctaacctaatcaaaccgttgctctccagcggtaaaattcgcgtaattggttcgacaacctatcaggagttcagcaacattttcgagaaagaccgtgctctggcgcgtcgcttccagaaaattgatattactgaaccgtcgatcgaagaaactgttcaaatcatcaatggcctgaaaccgaagtatgaagcacaccacgacgtgcgttataccgcaaaagcggtgcgtgcggcggtagagctggcggtgaaatacattaacgatcgtcatctgccggataaagccattgatgttatcgacgaagcgggcgctcgcgcacgtctgatgccggtaagcaaacgcaagaaaaccgttaatgtggcggatattgagtccgtggtggcccgtattgcacgcattccagagaagagtgtttctcagagtgaccgcgataccctgaaaaacctcggcgatcgcctgaaaatgctggtcttcggtcaggataaagccattgaggcgctgactgaagccattaagatggcgcgtgcaggtttaggtcacgaacataaaccggtcggttcgttcctgtttgccggccctaccggggtcgggaaaacagaggtgacggtacagctttcgaaagctttgggcattgagcttctgcgctttgatatgtccgagtatatggaacgccataccgtcagccgtcttattggtgcgcctccgggatacgttggttttgatcagggcggtttgctgactgatgcggtcatcaagcatccacatgcggtgctgctgctggacgaaatcgagaaagcgcacccggacgtgttcaatattctgttgcaggtgatggacaacggtacgctgaccgataacaacggacgcaaagcggacttccgtaacgtggtactggtgatgaccactaacgccggggtacgggaaactgagcgcaaatccattggtcttatccaccaggataacagcaccgatgcgatggaagagatcaagaagatctttacaccggaattccgtaaccgtctcgacaacattatctggttcgatcatctgtcaactgacgtgatccatcaggtggtggataaattcatcgtcgagttgcaggttcagctggatcagaaaggtgtttctctggaagtgagccaggaagcgcgtaactggctggccgagaaaggttacgaccgggcaatgggcgcacgtccgatggcgcgtgtcatccaggacaacctgaaaaaaccgctcgccaacgaactgctgtttggttcgctggtggacggcggtcaggtcaccgtcgcgctggataaagagaaaaatgagctgacttacggattccagagtgcacaaaagcacaaggcggaagcagcgcattaatctgattgtcaggtaggttggtgaagtccgtaatctcgaaagaggttacggactttttatttatggggtggaacggtgaaaaccctatttttggaggtgaaggtaatttgttgataattagtgctgctggaaaaggtaaggataaaaaagggtgacagcaggaaaatgagatggttttgctttattaacaacgggctaaacgtgtagtatttganttcactgccgtacaggcagcttagaaattcactggtaacatactccacccgccaccatgttcactgccgtacaggcagataaaatgcgaaaaaaaagcccgtactttcgtacgagctcttctttaaatatggcggtgagggggggattcgaacccccgatacgttgccgtatacacactttccaggcgtgctccttcagccactcggacacctcaccaaattgttttgctgccaaacctcatgggtggcaacggggcgctactatagggagttggagtaaaacggtcaagaagaattttaatgataattattgtttgctcatactgtaaacaacttgtgcagtatatctacatcgagacaagttatggacttatacttccaaagtacttcatacatatcacaaaataaaaaggccggttaaaccgaccttttactcgttctttctcttcgcccatcaggcggtaaaacaatcagcgactacggaagacaatgcggcctttgctcaggtcgtacggggtcagttcaacagtcactttgtcgcccgtcaggatgcggatgtagtttttgcgcattttaccggagatgtgtgcagtaaccacgtgaccgttttctaactctacgcggaacatggtattaggcaacgtttcaagaacggtaccttgcatttcaatattgtcttctttggccatctaatcctctggggtatcactaccgtaatttgaaccggcaagataatgccgaagttctgtaaataagtaaagatttgcgcgctaaatcgcaacaaacaggttcggcacattactccgaaaacacacggctaagccgcaccaaaagcgcaacgtataagggagcggtgagataaacgatgggcgttacctgacgcgaaaaattccttatcggcagcggggtaatgagcgtaaccaactctgcgaccgcaattataacactctggggagaaatgtgccgaaaacattcattcttgtggtgaaaacaagcatcgtggtacccagaaattattcggcaatcgtccgaggcgcatttgattgagataattaaggtaattccggcggggaatttcgcaggcaccaagcgatgctgtgtgatcgttaaggacctggcagtcgataagcttaccgccatgaccgataaattcctcacagaataccagaagcgccgttttagacgcattttccatccggctgaacatggactcgccacaaaatagcgttccctgggccacgccgtacataccgccgacaagctcatnttcacgccagacttcaatggagtgggcatgaccgagttcgtgaaggcgatggtaggcttcgaccacgccacgcgtgatccaggttccttcttcgcgatcgctggcacagccttcaatgacctgaccaaaagcgtaattcatcgtgacacgatagggcgagcgtttatgaaatcgcttcatactacggctgatatgcagtgattctggccatagcaccgcgcggggatcgggcgaccaccagaggatggggtcgcctggagaaaaccacggaaaaataccacgctggtaagccattaacaggcgcgcagggctaagatcgcccccaagtgccagcaggccgttaggctcacgtaatgcgccttccggggaagggaaggctattgaatggcgagaaagctgaaccaggcgcatgaccgcaaaactccacgcaagtcggatcgttcaataatagcttacaaaccctgcttgaactggtaataacgcccctgtctggcaagcagttctgcgtgagtaccttgctcaataatttgcccgttgtccatcactattatttgttggaaacgagagagtccgcgaagtcgatgggtgaccattaacaccgttttctcacgcatcatttctgcaagcaattcaaggatctggctttcggttgtggcatctaagccttcggtaggttcatccagcaacaccagtggcgcatcatgtaacagcgcacgggcgatagccagacggcgcagttcaccaccggagagctggcgtccgccttcacctaaccaactgttgagacctgcatcctcgagcagcttctccagaccaacgcgacgtaagatcaccgccagagcctcatcactactgccaggcgaggcgagtaacagattatcacgcagcgtggcgctaaacagatgcactcgctgaggaacaacgctgatggtctgtcgtagagccgcttcattcaggctggctatggggctatcgttaagcaaaatctcgccctgttgcgggtcccatgcgcgggtcagcagttgtaacagtgttgatttgccgcatccggttcgcccgagaatcgctatatgttccccggcgtttacctgaagagaaatccctttaagtgcctgttgggattgctccggataagtgaactgaacatcccgtaatgtcagcgaaacgcgatcggcaacacgagtttgggtatcagggaaggtgacctccggtttttgatccgttaagtcagagatacgtacggcagaggcaatgacttgccccagatgctgaaatgcacccgttactggtgccagtgcttcaaacgcggctaacgcgcaaaagacaaacagggcaattaacgcgccgggttgagcattgccgccaacgccgccagacgccatccacagcatcaggatcaccgctaacgcgccaatgagcagcattatcgcttgcgacaatgcggtcagttcagattgacggcgttgcgcttccagccattgaatttctgtattctctagttgcgtgcgataacgatcgctggcaccaaaaatggtcagctcagcttgcccttgcagccaggccgtcagttgttggcgatactgtccgcgaagatgagtcagattttgcccggtgctttttcccgcacgataaaacagcggtggcatcaggaaaagcgtcagtaacataatgccgcccagcgtaaaggcgagggtggaatcaaggaaacttaacccgattgtcaccaccataatcaccacaaaagcgcccaccagcggcgagataacgcgcaggtaaagatgatcgagcgtatcaacatccgccaccacgcggttgagcaattcgccctgacgatagcgcgccagtccggcaggggagaggggcaacaatttgctgaaggtgtaaatgcgcagatgctgcaacacgcggaaagtcgcgtcgtgacttaccagacgttcaaaataacgcccggcagtacgggtgattgctgcaccacgcacgcccgcagcgggtagcatatagttgaagctgtacagtccggcaacccccgcaaccgctgaggccgagaggaaccagccggaaagtgtcaacagaccgatactggcgagcagcgtcacaattgccagcacaataccaagacttaacatccatttatgacgtttatacagtgccagatagggtagcaaagcgcgcatttaaatctcctcctgacgatgggccagtaatgtggcgaatgggccaccagccacacttaattccgcgtaacgtccttgctcaataatccggccatcctgcataacccaaatgacatcccagtcagcaagatcttctaactggtgggtgaccattaacgttgtctggcgcagagaggcggcattcagcgcctccattacgcgctgttcactgtgagcatcaaggctggcagcgggttcatccaacagtaatagcgaacagggatttagtaacgcacgggccaccgccacgcgctgcgcctgccccacggaaaggcgggcagcctggtcgccaacaggcgtatcaacgccttgtggcaggagcggtagaaactcgctgacccaggcgttatccagcgctgcttgtaattcttgttcgctggcatcaggtcgcgccagtagtacgttatcccgtaatgttgctgccggtaattgtgggttttgcccaacccaggagagatgtttacgccatgattctggtgataaatcgcgtaattctatcccgttgattcgtaatgatccctgatatgagagaaaaccagaaagcgcgttcagcagtgagcttttacctgaaccgctgcgaccaaccaacactgcacgttggcctgctggcaaagtaaagttcagcggtccggccagcgttttaccttccggcgacgtgataaacagatcctcggcctcaatggtcagcggatcggttgatgctaattccgtctcaccgcgctgcggatgggcgaacggggtttccataaacgttttcagactgtcagctgcaccaacagcctgggctttagcatgataaaacgtaccgagatcgcgtaatggctggaaaaactctggcgcaaggatcagggccagaaaacccgcagccagcgtcacgccagtatcgtagtgaccaaaatccagctcgccgagataggaaaaaccaaagtagaccgccaccagagcaattgacagcgaggtaaaaaattcgagaatgccggaggataaaaacgccagccgtagcactnnnnnngtccgttggcggaaatcttccgaagcagaacgaatactttcaatttcagcttcaccacgaccaaaaatacgcaatgtttccatgccgcgcaggcgatcgaggaaatgcccacttaagcgagcaagagcgagaaagttacgtcggttagcatcggcagcccccatcccaaccagcgccataaacaacggaattaacggtgcagtgcccagcagaatgagcgccgcagcccagttagaggggaagatcgccaccacaatcagcaacggcaccgacactgccagcgccatttgcggcaggtagcgtgcatagtaatcatgcatatcgtcaatttgctcgagtacnagcgtcgcccagctccccgcaggtttaccctgaatccacgctggccctgcttgttgcagacggtcgagaacctgacggcggatggcaaagcggatatgctgcccggcgtgataacccacccgttcgcgtaaccagaccacccatgcgcgcagtacaaaggtcagaaccattaacgtaaagggaagcagcagggcttcacggggaatattctccataatcatatgttgcagaattcgcgccatgaaccatgcctgggcaatgatcaatatgccgctcacaaagcccagcagacgagaaatattcagccaacgttgggagatgacgctttgctgttttaaccagcgggttaactctttttgacgagatttattcattgcacgcttagcaggtgagttatcagaattatttgcagagcaatgttacaacggggaaaaaataaaggcgacccatagtcgcatggtgtcgccttctttacttttgttactgatttgtaaaattattttgcgtcagctaaaccatcgaggtagcgttccgcatcaagtgctgccatgcagcctgtaccagcagatgtaatggcctggcgataaatgtgatccatcacgtcgcctgcggcaaagacgccaggaatgctggtctgggtggcattaccatgaatacccgactgcactttgatgtagccgttttccagttccagctgcccttcgaaaatggcagtattcgggctgtgaccgatagcaacaaacagaccggcaacgtcgagtgactcgatgttatcgctgttttgcgtatcgcgcagacgaacgccagtgacacccatttgatcgccggtcacttcttccagcgtacggttggtgtgcagaatgatgttgccgttctccactttatccatcagacgcttaatgaggattttttccgcgcggaaaccgtcacggcggtgaatcagatgcacttccgaagcgatgttagacagatacagcgcctcttcaaccgcggtattgccgccgccgatgaccgcaactttctggttgcgatagaagaaaccgtcgcaggttgcacaagcagaaactccacggcctttaaaggcttcttcagagggcaggccgagatagcgtgcagaagctccggtggcaataatcagcgcgtcgcaagtgtattcgccgttatcgccattcagacggaacggacggttttgcagatccaccttgttgatatgatcaaaaatgatctcagtttcaaacttggtggcatgttcgtgcatgcgctccattaataacggaccggtcagatcgtttggatcgccaggccagttttccacttccgtggtggtggtcagttggccgcctttttccatgccggtaatcagcacaggttgcaggttggcgcgcgccgcatagacagcagcggtgtatcccgccgggcctgaacccaggataagcagtttactgtgtttggtcgtgcccatgagatccccatagttgttggcagacaatgggcaggattgtagggaatttacagacgtaaaaaaagagtatgacgattttgttaacaatttgtgcaatcggcagcatcgataagcaggtcaaattctcccgtcattatcacctctgctacttaaatttcccgctttataagccgattaaatgatgaataaacgcccctgttaatgaatatctggcatgttgtactaaaaatcgatgttttgctttgacaatcccctagtgttttgcgaaaacattcgaggaagaaaaaaaacagtattcttatatgcgcataaccatgcatgtaaataccatgtttaccgtgctagtgaaatctacgtatggcgtggacagacgccattcgngatgtcgatagctgccacaaggcaacggtcttctcaccgtagacccaggcattgcgcgccgtgaatcttcatgatttcggtctatcgtgacgggtagcgactctgaacagtgatgtttcagggtcagacaggagtagggaaggaatacagagagacaataataatggtagatagcaagaagcgccctggcaaagatctcgaccgtatcgatcgtaacattcttaatgagttgcaaaaggatgggcgtatttctaacgtcgagctttctaaacgtgtgggactttccccaacgccgtgccttgagcgtgtgcgtcggctggaaagacaagggtttattcagggctatacggcgctgcttaacccccattatctggatgcatcacttctggtattcgttgagattactctgaatcgtggcgcaccggatgtgtttgaacaattcaataccgctgtacaaaaacttgaagaaattcaggagtgtcatttagtatctggtgatttcgactacctgttgaaaacacgcgtgccggatatgtcagcctaccgtaagttgctgggggaaaccctgctgcgtctgcctggcgtcaatgacacacggacatacgttgttatggaagaagtcaagcagagtaatcgtctggttattaagacgcgctaacacggaacaggtgcaaaatcggcgtattttgattacactcctgttaatccatacagcaacagtactggggtaacctggtactgttgtccgttttagcatcgggcaggaaaagcctgtaacctggagagcctttcttgagccaggaatacactgaagacaaagaagtcacattgacaaagttaagtagcggccgccgccttctggaggcgttgctgatccttattgtcctgtttgccgtctggttgatggctgccttactaagctttaacccttcggaccccagctggtcgcaaacggcctggcatgaacctatccataatttaggtgggatgcccggtgcgtggttggcagatacgctgttctttatttttggcgtgatggcttacaccattcccgtcattattgtcggcggttgttggtttgcctggcgtcatcagtccagcgacgaatacattgattattttgccgtttcgctacgcatcattggcgttttggcgctcatccttacctcctgtggtctggcggcaatcaacgctgacgatatctggtattttgcctccggtggcgtcattggcagcttactaagcactacgctacaaccactgctacacagtagcgggggaactattgcgctgctctgcgtttgggcagcgggcctgacgttgttcaccggttggtcatgggtgaccattgctgaaaaactcggcggctggattttaaacattctcaccttcgccagtaatcgtacccgtcgcgatgatacctgggtcgatgaagatgagtatgaagacgacgaagagtatgaagatgaaaaccacggcaaacagcatgaatcacgccgtgcccgtattcttcgcggcgcnctagcgcgtcgtaaacggttggcggaaaaattcattaatccgatggggcggcaaacagacgctgcgttgttctccggtaagcggatggatgatgacgaagagattacctacactgcacgcggtgtggctgccgacccggacgacgtcctattttcgggcaatcgtgcaacgcagccagaatatgacgaatacgatccattattaaacggtgcgccaattaccgaacctgtcgctgtagcagctgctgctaccacggcgacacaaagctgggctgcgccggttgaacctgtgactcagacgccgcctgttgcctctgttgatgttccaccttcgcaacctacagtagcctggcagcctgtaccgggtccacaaacgggagagccggttattgctcctgcaccggaaggttacccacagcagtcacaatatgcgcagcctgcagtgcaatataatgagccgctgcaacaaccagtacagccgcagcagccgtattatgcacctgcagctgaacaacctgcgcaacagccgtattatgcccctgcgccagaacaaccggtggcaggtaacgcctggcaagccgaagagcagcaatccacttttgctccacagtctacataccagactgagcaaacttatcagcagccagccgctcaggagccgttgtaccaacagccgcaacccgttgaacagcagcctgttgtggagcctgaacccgttgtagaaganacaaaacccgcgcgtccgccgctttactactttgaagaagttgaagagaagcgagcccgtgaacgtgaacaacttgcggcctggtatcaaccgattccagaaccggttaaagaaccagaaccgatcaaatcttcgctgaaagcaccttctgttgcagcagtacctccagtagaagccgctgccgctgtttctccgctggcatctggcgtgaaaaaagcgacactggcgacgggggctgccgcaaccgttgccgcgccagtcttcagtctggcaaatagcggtggaccgcgtccgcaggtcaaagaggggattggcccgcagttgccacgaccgaaacgtatccgcgtgccaactcgtcgtgaattggcgtcttacggtattaagctgccctcacagcgtgcggcggaagaaaaagcccgtgaagcccagcgcaatcagtacgattctggcgatcagtacaacgatgatgaaatcgatgcgatgcagcaggatgaactggcacgtcagttcgcccagacacagcagcaacgctatggcgaacagtatcaacatgatgtgcccgtaaacgcagaagatgcagatgctgcggcagaggctgaactggctcgtcagtttgcgcaaactcaacaacaacgttattccggcgaacaaccggctggggcgaatccgttctcgctggatgattttgaattttcgccaatgaaagcgttgctggatgatggtccacacgaaccgctgtttacgccaattgttgaacctgtacagcagccgcaacaaccggttgcaccgcagcagcagtatcagcagccacaacagccggttgcgccacagccgcagtatcagcagccacaacagcaggttgcgccgcagccacaatatcagcagccgcaacaaccggttgcgccacagcagcaatatcagcagccgcaacaaccagttgcgccgcagccgcagtatcaacagccgcaacaaccggttgcaccgcagccgcagtatcagcagccacaacagccagttgcgccacagccgcaggatactctgcttcatccgctgttgatgcgtaatggcgacagccgtccgttgcataaaccgacgacgccgctgccttctctggatttgctgacaccgccgccgagcgaagtggagccggtagatacctttgcgcttgaacaaatggctcgcctggtggaagcgcgtctggctgatttccgtattaaagccgatgtcgtcaattactctccggggccggttatcactcgctttgaacttaacctggcaccgggcgtaaaagcggcgcgcatttctaacttgtcacgggaccttgcccgttcactttcgacggtggcggtgcgtgtcgttgaagttattcctggcaaaccctatgtaggtctggagttaccgaataaaaaacgacaaaccgtttatctgcgcgaagtattggataacgccaaattccgcgataatccatcgccattaaccgtggtgctgggtaaagatatcgccggtgagccggtggttgccgatctggcgaaaatgccgcacttgttagttgcggggactaccggttccggtaaatctgtcggtgtgaacgcgatgatcctgagcatgctttataaagcacagccagaagatgtgcgtttcatcatgatcgacccgaaaatgctggagctttcggtgtatgaaggcattccgcacctgttaacggaagtcgttactgatatgaaagatgccgccaacgcgctgcgctggtgtgttaacgagatggagcgtcgttataaactgatgtctgcgctgggtgtgcgtaatctggcgggttataacgaaaaaattgctgaagccgatcgcatgatgcgtccgattccagacccgtactggaagccgggtgacagtatggatgcccagcatccggtgctgaaaaaagaaccatacattgtggtgttggtggacgaatttgccgacctgatgatgacagtaggtaaaaaagtggaagagctgatagcacgtctggcgcaaaaagcccgtgccgcgggtatccacctcgtactggcaactcagcgtccatcggttgatgttattactggtctgattaaagcgaatattccgacccgtatcgcctttaccgtatccagtaagattgactcacgtaccattcttgatcaggctggcgcggaatcactgctgggtatgggggatatgctctactctgggccgaactccacgttgccggtacgtgtccatggtgcttttgttcgcgatcaggaagttcatgccgtggtgcaggactggaaagcgcgtggtcgcccacagtatgttgatngcatcacctccgacagcgaaagcgaaggtggtgcgggtggtttcgatggcgctgaagaactggatccgttgttcgatcaggcggtgcagtttgtcactgaaaaacgcaaagcgtcaatttctggcgtacaacgtcagttccgcattggttataaccgtgcagcgcgtattatcgaacagatggaagcgcaggggattgtcagcgaacaggggcacaacggtaatcgtgaagtgctggccccaccgccgtttgactaattaatgcattgccggataaggcgcggtagcgtcgcatccggcactctatcaactgaaaattcagtattttcttctttcctcaagctgattattagcctggaatagagattagagggaactcccgatcgggagtgacgtaatttgaggaataatgatgaaaaaaattgccatcacctgtgcattactctcaagcttagtagcaagcagcgtttgggctgatgccgcaagcgatctgaaaagccgcctggataaagtcagcagcttccacgccagcttcacacaaaaagtgactgacggtagcggcgcggcggtgcaggaaggtcagggcgatctgtgggtgaaacgtccaaacttattcaactggcatatgacacaacctgatgaaagcattctggtttctgacggtaaaacactgtggttctataacccgttcgttgagcaagctacggcaacctggctgaaagatgccaccggtaatacgccgtttatgctgattgcccgcaaccagtccagcgactggcagcagtacaatatcaaacagaatggcgatgactttgtcctgacgccgaaagccagcaatggcaatctgaagcagttcaccattaacgtgggacgtgatggcacaatccatcagtttagcgcggtggagcaggacgatcagcgcagcagttatcaactgaaatcccagcaaaatggggctgtggatgcagcgaaatttaccttcaccccgccgcaaggcgtcacggtagatgatcaacgtaagtagaggcacctgagtgagcaatctgtcgctcgatttttcggataatacttttcaacctctggccgcgcgtatgcggncagaaaatttagcacagtatatcggtcagcaacatttgctggctgcggggaagccgttgccgcgcgctatcgaagccgggcatttacattctatgatcctctgggggccaccgggtaccggcaaaacaaccctcgctgaagtgattgcccgctatgcgaacgctgatgtggaacgtatttctgccgtcacctctggtgtgaaagagattcgcgaggcgatcgagcgcgcccggcaaaaccgcaatgcaggtcgccgcactattctttttgttgacgaagttcaccgtttcaacaaaagccagcaggatgcatttctgccacatattgaagacggcaccatcacttttattggcgcaaccactgaaaacccgtcgtttgagcttaattcggcactgctttcccgtgcccgtgtttatctgttgaaatccctgagtacagaggatattgagcaagtactaactcaggcgatggaagacaaaacccgtggctatggtggtcaggatattgttctgccagatgaaacacgacgtgccattgcagaactggtgaatggcgacgcgngccgggcgttaaatacgctggaaatgatggcggatatggccgaagtcgatgatagcggtaagcgggtcctgaancctgaattactgaccgaaatcgccggtgaacgtagcgcccgctttgataacaaaggcgatcgcttttacgatctgatttccgcactgcataagtcggtacgtggtagcgcacccgatgcggcgctgtactggtatgcgcgaattattaccgctggtggcgatccgttatatgtcgcgcgtcgctgtctggcgattgcgtctgaagacgtcggtaatgccgatccacgggcgatgcaggtggcaattgcggcctgggattgctttactcgcgttggcccggcggaaggtgaacgcgccattgctcaggcgattgtttacctggcctgcgcgccaaaaagcaacgctgtctacactncgtttaaagccgcgctggccgatgctcgcgaacgcccggattatgacgtgccggttcatttgcgtaatgcgccgacgaaattaatgaaggaaatgggctacgggcaggaatatcgttacgctcatgatgaagcaaacgcttatgctgccggtgaggtttacttcccgccggaaatagcacaaacacgctattatttcccgacaaacaggggccttgaaggcaagattggcgaaaagctcgcctggctggctgaacaggatcaaaatagccccataaaacgctaccgttaatgttatcgttgcggtaatgttgttactgtatccctgtggtcgcaggctgtggccacatctcccatttaattcgataagcacaggataagcatgctcgatcccaatctgctgcgtaatgagccagacgcagtcgctgaaaaactggcacnccggggctttaagctggatgtagataagctgggcgctcttgaagagcgtcgtaaagtattgcaggtcaaaacggaaaacctgcaagcggagcgtaactcccgatcgaaatccattggccaggcgaaagcgcgcggggaagatatcgagcctttacgtctggaagtgaacaaactgggcgaagagctggatgcagcaaaagccgagctggatgctttacaggctgaaattcgcgatatcgcgctgaccatccctaacctgcctgcagatgaagtgccggtaggtaaagacgaaaatgacaacgttgaagtcagccgctggggtaccccgcgtgagtttgactttgaagttcgtgaccacgtgacgctgggtgaaatgcactctggcctcgactttgcagctgcagttaagctgactggttcccgctttgtggtaatgaaagggcagattgctcgcatgcaccgcgcactgtcgcagtttatgctggatctgcataccgaacagcatggctacagtgagaactatgttccgtacctggttaaccaggacacgctgtacggtacgggtcagctgccgaaatttgctggcgatctgttccatactcgtccgctggaagaagaagcagacaccagtaactatgcgctgatcccaactgcagaagttccgctgactaacctggtgcgcggtgaaatcatcgatgaagatgatctgccaattaagatgaccgcccacaccccatgcttccgttctgaagccggttcatatggtcgtgacacccgtggtctgatccgtatgcaccagttcgacaaagttgaaatggtgcagatcgtgcgcccggaagactcaatggcggcgctggaagagatgactggtcatgcagaaaaagtcctgcagttgctgggcctgccgtaccgtaaaatcatcctttgcactggcgacatgggctttggcgcttgcaaaacttacgacctggaagtatggatcccggcacagaacacctaccgtgagatctcttcctgctccaacgtttgggatttccaggcacgtcgtatgcaggcacgttgccgcagcaagtcggacaagaaaacccgtctggttcataccctgaacggttctggtctggctgttggtcgtacgctggttgcagtaatggaaaactatcagcaagctgatggtcgtattgaagtaccagaagttctgcgtccgtatatgaacggactggaatatattggctaatacccaatttttctgaatctaaaaagcgcctacgggcgctttttttgtctccctttgataccgaacaataattactcctcacttacacgtaatactactttcgagtgaaaatctacctatctctttgattttcaaattatccgatgtatacaagcctatatagcgatctgctatagaaataattacacaatacggtttgttactggaatcaatcgtgagcaagcttgagtgagccattatgaaaacgaaaatccctgatgcggtattggctgctgaggtgagtcgccgtggtttggtaaaaacgacagcgatcggcggcctggcaatggccagcagcgcattaacattaccttttagtcggattgcgcacgctgtcgatagcgccattccaacaaaatcaggcgaaaaggttatctggagcgcctgtacagttaactgtggtagtcgctgcccgctacgtatgcacgtcgtggacggtgaaatcaaatatgtcgaaacggacaataccggcgatgacaattacgacggcctgcaccaggttcgcgcctgcctgcgtgggcgttccatgcgtcgccgtgtctacaatccggaccgcctgaaatatccgatgaaacgagtcggggcgcgcggtgaaggcaaattcgagcgcattagctgggaagaagcctacgacatcatcgcgaccaatatgcagcgcctgatcaaagagtacggcaacgaatccatctatctgaactatggcaccggtacgctgggtggcaccatgacccgctcctggccgccgggaaataccctggtcgcgcggctgatgaactgctgcggcggctatctgaaccattacggcgactactcctccgcgcaaattgcggaaggtctgaactatacctacggcggctgggcagatggcaacagcccgtcggatatcgaaaacagtaagctggtagtgctgtttggtaataaccctggcgaaacgcgaatgagtggcggtggggtgacttactatcttgaacaggcacgccagaaatctaatgcccgcatgatcatcatcgatccgcgctataccgacaccggtgccgggcgcgaagatgagtggatccctattcgtccgggaacagatgccgcactggttaacggtctggcgtacgtcatgatcactgaaaacctggtggatcaggcattcctcgataaatattgcgttggctacgatgagaaaaccctgccagccagtgcgccgaaaaatggccactataaagcttatattctgggtgaagggccagatggcgtggctaaaacaccggaatgggcctngcaaatcaccggtgttccggcagacaaaatcatcaaactggctcgtgaaatcggcagtaccaaaccggcgtttatcagccagggatggggcccgcagcgtcacgctaacggtgaaatcgcaacccgtgctatctcgatgctggcgattctgaccggtaacgttggtattaatggagggaacagcggcgcgcgtgaaggttcatacagtttaccgtttgtccgtatgccgaccttggaaaacccgatccagaccagcatttcgatgtttatgtggaccgatgccattgaacgtggcccggaaatgacggcgctacgtgatggtgtgcgcgggaaagataagctggatgtgccgatcaaaatgatctggaactatgccggtaactgcctgattaaccagcattctgaaatcaaccgtacccatgaaatccttcaggatgataagaagtgcgagctgattgtggttatcgactgccacatgacctcatcggcgaaatatgctgacatcctgctgcctgactgcaccgcttccgaacagatggactttgcactggatgcatcctgcgggaatatgtcttacgtgattttcaacgatcaggtgattaaaccgcgctttgaatgtaagaccatctatgaaatgaccagcgaactggcaaaacgtcttggcgttgagcaacagtttactgaaggccgtacccaggaagagtggatgcggcatctgtatgcccagtcgcgggaagcgattcctgaactgccaacgtttgaagagttccgcaagcaggggatctttaaaaagcgcgacccacaagggcatcacgttgcttataaagccttccgtgaagatccgcaggcaaatccactgaccacgccatcgggtaaaattgagatttattcgcaggcgctggctgacattgccgctacctgggaattgccagaaggcgatgtgatcgatccactgccgatctacacgccgggctttgaaagttatcaggatccgctgaacaaacagtatccgctgcagcttacaggtttccactataaatctcgcgttcactcaacttacggcaacgttgatgtgctgaaagcggcttgccgtcaggaaatgtggatcaacccgcttgatgcccaaaaacgcggtatccacaacggcgataaagtcaggatctttaacgatcgtggtgaggttcatattgaggcgaaagtgacgccacgaatgatgccgggtgtggtcgcactgggtgaaggtgcctggtatgacccggatgcaaaacgtgtcgataagggtggttgtattaacgtactgaccactcaacgtccgtctcctctcgctaaggggaatccgtcacatacaaaccttgttcaggttgaaaaggtgtaaggagtaaccgatgacaacccggtatggattttttattgattccagccgttgcaccggttgcaaaacctgcgagctggcttgtaaagactacaaagatttgacgccagaagtcagcttccgccgcatttatgaatatgctggtggcgactggcaggaagataacggtgtctggcaccagaacgtgtttgcctactatctgtcgatttcgtgcaaccactgcgaagatccggcttgtactaaagtctgcccgagcggtgcgatgcataaacgtgaagatggttttgttgtggtcgatgaagatgtgtgcattggctgccgctactgccatatggcttgcccgtatggcgcaccgcaatataacgaaacgaaaggccatatgaccaaatgcgatggttgttatgaccgtgttgcggagggtaaaaagccgatctgtgttgaatcttgtccgctgcgggcgctggatttcggccctatcgacgagctgcgtaaaaaacatggcgatctggcggccgttgcgccgttgccgcgagctcactttaccaaaccgaatattgtgatcaaacccaatgccaatagccgcccgaccggggataccactggctatctggcaaacccgaaggaggtgtgagatgggaagtggatggcatgaatggccgctgatgatcttcacggtcttcgggcaatgtgtggcgggtggttttatcgttctggctttggcgctgctcaaaggcgacctgcgagcagaagcccagcagcgtgttatcgcctgcatgtttggcttatgggtgctgatgggcattggctttatcgcctctatgctccatcttggttcaccgatgcgcgcctttaactcgctcaaccgggtaggggcttcagcactcagtaacgaaatcgccagcggttcgatcttttttgctgtaggcggcatcggctggttgctggcaatgctgaaaaagctgtcacctgcattgcgtacgctatggctggtggtgacgatggttcttggcgtcgtctttgtctggatgatggtgcgtgtgtataacagcattgataccgttccgacctggtacagcatctggacgccgatgggcttcttcctgacgatgttcatgggcggcccgttactgggttacctgttgctgagtctggctggcgtcgatggctgggcgatgcgtctgctgccagccatttctgtactggcactggtggtgagtggcgtgatgtcagtgatgcagggcacagagctggcaactattcatagttctgtgcagcaggccgcagcgctggtgccggactatggtgcgctgatgtcctggcgaatcgtgcttttggccgttgccctgtgcttgtggattgcaccacagctaaaaggttatcagcctgcggttccgctactatccgtctcattcattctgcttctggcaggggaattaatcggtcgcggcgtattctatggtttgcatatgaccgtggggatggccgtcgcaagctaatcagtaacaaccggggtttcggccccggttctcttttatttctgcttcgttaacgtgtcataactggtcatcaaattacgataatcaggaatgtggttagagaacaacgtcgccagtccttcaatatcattacgccagtcacggtgcagctcgcaagccacgccgaaccatgtcatcaattgcgcacctgcttgcgacatgcgatcccatgccgaatgccgggtaatttcattaaaggtccctgacgcgtcagtcacaacaaagacatcaaaccnttcttcaatggctgaaagcgccgggaatgccacgcaaacttcggttaccacaccggcaataattaactgttttttacctgtcgctttgactgcttttacaaaatcttcgttatcccaggcgttaatattgccagggcgagcaatgtaaggtgcatcggggaattgtgctttcagctctggaactaatgggccgttaggaccggtttcaaaactggtggtaagaatagttggtaagttgaaatacttagccaggtcacccagcgccagcacgttatttttaaacttatcgggttcgatatcccgtacaagggaaagtaaaccagcctggtgatcaacaagcaaaacggcagcatcatttttatcaagacgaacatacggtttggtcatcctcttctcctttcgagagtcagtggtacgtctgaaatcggtcagacgcgatgcattgctctgaaagcatagacgggaaatatgagtttgctgtgaccatgaaatttttcgactgaacgaagcgtatgaaatttgtgttagatcaataaaaacaatcagatgagattaatcatctcttcagcattagcgttatgaatgagtaatataaatcgataataccgccgctgcgatatgcgcgtattttcacccattgacaatgttttttgcggtggcatgatgcgcatgaaatttgaacttcctcacggttttaattcatgtccacgtatacccggcctgtcatgcttttgctgtctggcctgcttttgttgactctggcgatcgcggtgttaaatacactcgtgccgctttggctcgcccaggaacacatgtccacatggcaggtaggcgttgtcagctcatcctattttaccggcaaccttgtcggtacattgctgacagggtatgtcattaaacgcattggctttaaccgcagctattatctggcctccttcatttttgccgctggctgtgccggccttggcctgatgattggtttctggagctggttggcgtggcgttttgtcgcgggcgtcggctgtgccatgatttgggtagtcgttgagagcgcgctgatgtgcagtgggacgtcacgtaaccgtgggcgtttgcttgctgcgtatatgatggtttattacgtgggaacatttttaggccagttactggtcagcaaagtctcaaccgagctgatgagcgtattgccgtgggttacaggtttgacgttggcagggatcttaccgctgttgtttacgcgtgtcctgaatcagcaggctgaaaaccatgattcgacgtcaattacgtcaatgctaaaactccgtcaggcgcggcttggcgtgaatggctgcattatctcaggaatcgtgctgggatctctatatggcctgatgccgctgtacctcaatcacaaaggggtgagcaatgccagcattggtttctggatggcggtactggtcagtgcgggtatcctcggacaatggccgattggacgtctggcggataagtttggtcgactgctggtgttgcgtgttcaggtctttgtcgtcattctcggcagtatcgcgatgcttagccaggcggcgatggccccagcgttattcatcctcggtgccgctggctttacgctatatccggtggcgatggcctgggcttgtgagaaagttgaacatcatcaactggtggcgatgaaccaggccttactgttgagctataccgtgggaagtctgcttggcccgtcatttaccgctatgctaatgcagaatttctccgataatttattgtttatcatgatcgccagcgtatcgtttatctatttgctgatgctgcttcgcaacgccggtcatacgccgaaacccgttgctcacgtgtaaatgaattcaagcaaagtgtgaacttactgtttcacactctgcttttttgtttcttctatctgacttgcttttttccaaattttattcgtttaaaaataaaatgtgcagcaggttataattttgcatttcgctatttccgcacttcttatttgccgcgcataatccctcgttttacagatgcccctttaattttggcgaaggatttgtctatggctgggaatgttcaggaaaaacagctgcgatggtacaacattgcgctgatgtcttttatcactgtctggggttttggcaacgttgttaataactatgccaaccaggggctggtggttgttttttcatgggtgtttatctttgcgctctatttcacaccttatgcactaattgttggtcagttaggctcgaccttcaaagatgggaagggcggggtcagtacctggattaaacacacgatgggacccggattggcttacctcgccgcgtggacctactgggtggtgcatattccctatctggcacaaaaaccccaggcaatactgattgcgctcggttgggcgatgaaaggcgacggttcgctaatcaaagaatattcagtcgtagcgttacaggggttaacgctggtgctgtttatcttctttatgtgggttgcttcacgcggtatgaaatcgctgaaaatcgtcggttctgtggcagggattgcgatgtttgttatgtcgctcctgtatgtggcgatggcggtaaccgcgcctgcgattactgaagtgcatattgcgaccacaaacattacctgggaaacgttcattcctcatatcgactttacctacattaccactatttcaatgctggttttcgcggttggcggagctgagaagatttctccttacgttaatcaaacgcgcaacccaggaaaagaatttccaaaagggatgttatgcctggcggtgatggttgcggtttgtgccattctgggctcactggcgatggggatgatgtttgactcgcgtaatatcccggatgacttaatgactaacggtcagtattacgcctttcagaagctgggcgagtattacaacatgggtaatactttaatggtgatttacgccattgcgaataccctgggacaagtagctgcgctggtattctcgattgatgccccgcttaaagtgctattaggcgatgctgacagcaaatatattccagccagtttatgtcgtaccaacgcttctggtacgcccgttaatggctattttctgaccctggtgctggtggcgatcctgattatgctgccgactctcggcatcggtgatatgaacaatctctataaatggctgttgaatcttaactcggtagtgatgccgctgcgttatttatgggtatttgttgcatttattgcagtcgttcgcctggcgcagaaatatacaccagagtatgtctttattcgtaataagcctctggcaatgaccgtcgggatttggtgttttgcctttactgcctttgcctgtttgacggggatcttcccgaaaatggaagccttcactgcagagtggaccttccagttggcgctgaatgttgcaacgccgtttgtgctggtaggattaggactgatattcccgctgctggcgcgtaaagcgaatagtaaataattattgtggtcggtgacgctgactctggcagatctgacccgtttttacataatcgagaaatgcgcgcaagccgcaggacatatactggcggtttgggtaatacatttggaagctgtgctgtaagggcgttagaaatagagctctgaattatttatgcagcgcggaataaaaaagcggcaactcaataaagttgccgctttacggggaaattagaacattaccttatgaccgtactgctcaagaatacctttcacgcgttccatggtttctttcttcggtggtttaacaccatcgagtttgtattcttcacccatcgccacccatttgtgtttgcccagttcgtggtaggggagaagttcgattttctcaacgttacccatatcacgggtaaattcaccgaggcgatgcgctgaatcgtcatcgtcagaccagcctgggacaacaacgtagcggatccacaccttcacatttttattcgccagatatttggcgaactccagcgtgcggtggttggaaactccaaccagattttggtggatctcgtcgttcatctgtttgagatcgagcattaccaggtcggttacttccagcagttcatcaatcaccggatcgtaacgacgaacaaaaccgttggtgtccagacaggtatgaatgccttcttttttgcaggcgcggaaccagtcacgaacaaactcagcttgcaggattgcttcaccgccggatgcggtaacgccgccgccggaagcgttcataaagtggcgataggtcaccacttccttcatcaaatcttcaacggtaacttctttaccgccatgcgtgtcccaggtgtcgcggttatgacaatacaggcagcgcatcaggcagccctggaaaaaggtgataaagcgaatacctgggccgtctacggttccacaggattcaaaggagtgaatgcgaccaataactgacattgcggtgtttctccagatgtggcccatctgaggccgtgttggtgcgcagctcgaaggctacgtcgagtctgttttggcagtcaccttaaagtatagatagctgacaaaaaaggctcacgtgctaaaaaaggccccactttcgtggagcctttattgtacgctttttactgtacgatttcagtcaaatctaattacatagattgagtgaaggtacgagtaataacgtcctgctgctgttctttagtcagcgagttgaaacgtactgcgtagccagatacacggatggtcagctgcggatatttttccggattttccatcgcgtcgagcagcatttcacggttcatcacgttaacgttcaggtgctgaccaccttcgatggatgcttcgtggtggaagtaaccatccatcagaccagccaggttggtcttacgaacttcgtcgtctttacccagtgcgttcggaacgatagagaaggtgtaggagataccatctttagcgtaagcaaacggcagtttagcaacggaagtcagagacgctacagcacctttctggtcacgaccgtgcatcgggttagcacccggtccgaangnnnngccagcacgacgaccgtctggggtgttacccgttttcttaccatacacaacgttagaagtgatggtcagaacagactgagtcgggatagcgtcacggtaggtgtgcagtttctgaattttcttcatgaaacgttctactaggtcaacagccaggtcatctacacgcggatcgttgttaccaaactgcgggtattcgccttcgatttcgaagtcgatagccagaccgtcttcgtcacgaatcggtttaactttcgcatatttgattgcagacagggagtcagcagcaacggacagaccagcgataccacacgccatggtgcggataacgtcacggtcgtgcagcgccatcagagaggcttcgtagctgtacttgtcgtgcatgtagtgaatgatgttcagtgcagtgatgtactgtttagccagccagtccatgaagtgatccatgcgctccatcacttcatcgtagttcaggagatcgcctttgatcggttcagacttcggaccaacctgcattttcagtttttcgtcaacgccgccgttgattgcgtacagcatggttttcgccaggtttgcacgcgcaccgaagaactgcatttgtttaccaacgatcatcgggcttacgcagcaagcgatagcgtagtcatcgttgttgaagtccggacgcatcaggtcatcgttctcatactgcagagaagaggtgtcgatggacactttagcggcgaatttcttgaagttcagcggcagtttttcagaccacagaatggtcatgttcggttccggagacggacccatggtgtacagggtgttcaggaaacggaagctgtttttggtaaccagggtacgaccgtcgaggcccataccaccgatagattcggttgcccagatcgggtcgccagagaacagttcatcgtactccggagtacgcaggaagcgaaccatacgcagtttcatgaccaggtggtcaaccatttcctgcgcttcttgttcggtgatcttgccagctttcaggtcacgttcgatgtacacatccaggaaggtggaggtacgaccgaaggacattgcagcaccgttctgagacttaacagcagccaggtagccgaagtaagtccactggatagcttcctgagcgttggtagccggaccagagatgtcgtagccgtatttcgcagccatttctttcatctgacccagagcgcggtgctgttcagcgatttcttcgcgcagacggatagtctgttccaggtttacgccgttttccagatcagcctgcagagaggtgaactgagcgtatttgtctttcatcaggtagtcgataccgtacagcgcaacgcgacggtagtcaccgatgatacggccacggccataagcatctggcagaccggtcagaacaccggatttacggcaacgcaggatgtccggagtgtaaacgtcgaacacgccctggttgtgagttttacggtattcagtgaagatttttttgatcatcgggtccagttcgcggttgtacgctttgcaggaaccttcgatcattttgataccaccgaacgggataagagcacgtttcagcggagcttcagtctgcagaccaacaactttttccaacgctttgttgatgtagccagcgtcgtgagaggtgatggtggaagcaacagcggtgtcgaagtcaactggcgcgtgagtgcggttttccagtttaacgccttccattactttgtcccacagggtggtggtcgcttcagtagcgccagccaggaaggactcgtcaccctcgtacggagtgtagtttttctgaatgaagtcacggacgtttacttcattctgccagtcacctttggtaaaaccttcccaggctgtggctaacttttcattaagctcggacatgtaacacctaccttcttaagtggattttttatttactgcgtacttcgacaaccattaatggtgatcgttttcacgcaggtaaatgacccagtatgtcaacccaaccaacaaaccaccgccgataatattaccgatcgtaaccggaatcaggttatcagtgatgaagttcatcacggtcaggtgagaaaaattttccggtgcagaaccgacagcggtccagaattccggagatgcgaagtcgcggattacaatacccatcgggatcataaacatgtttgcgatactgtgctcaaaaccgctggcaacaaacatcgcgaccggcagcaccatgataaacgctttgtccatcaggctgcggccagaataactcatccatactgccagacataccatcaggtttgccaggataccaaggcagacggcctcaataaaagtatggtgcactttgtggtcggcggtttgtaggacgtttagtccccattgaccatttgcggtcatatactcgccggaaagccacattaaaagtacaaacagcagtgcgccgaccaggttgccaaaatagacatttagccagtttttagccaactgaccccaagtgatgcgcccactcgccttagcaacaacaatcaacactgtggaagtaaagagatcggctccgcagacaacacaaagaatcagtcccagagagaagcaaatgccgccaaccagttttgccatgccgaagggcattgtgcctgtgccagtggttgctgtgatatagaagacgaatgcgattgagatgaaaacaccggcggtaatcgccagatagaaagtcttaagcggatgtttcgttgctttatagacacccgcctcttcggccactttggccattgcagcaggaagtaaaagatcaaaagggttgtcagctttcacactaactctctctttattaagtcggcgacgagatactaacaaagcattatagatgagaaattgatatagatcatatctcgcctggcttataggcccgtaactcgcatggtttttatgcaaatacggagtaaatatttgattatccnnnnnnnnnnnnnnnnnnnnnnnnnnnnnnnnnnnnnnnnnnnnnnnnnnacaaatgagttgaattttttccgcatcctccgctaaaacagttaattaaaagggagcatcaggcgaataaagtaacaatatcgatcgtatttattaaatacaaattaccgatatttaaccttataattacaattattttattaatgcaaatatatgtaaagcggggcattaaaaaaacgccccgtaatataactcagacgaatcattaagcctacattacgtaggctatttgattttattttgcccagaatgctgctttggcgcgctgcagcttttcgtaggccttcaacagcgactgatgtgcagcaaacgcgtgcagatcgctatctactggttgcaagccataaaacgccgcttcgccgctcattgccgcactggcggcttccacggcatctgcgccgtacatgcgaacaaacgcattcagatattgcagcggctggcgatcttcttcctgcgccagtaataacaacgtttgcaggcagcgataatagttggcgcgttccgggctgaataccgatgagttaaactccatcgtccattcggtccagaccagagcctgttccagatcgccaccagccagcgccagcatggcttttaattcaccaatacgcagggtgtaccaaccgttatccgacccggtcgccagacccaacagctcacgcacgcgggtaaagtcatcaaaaccttcttcatccagttgctcgatgaggttcaggtaatcttctttttcccactcgctgcctggtagcgaaagaatcgtttcacgtaaatggctgcccatactgttattcgcgagccacagatcttcagccggataaatatcggacatgccaggcacgataatacggcaagcataaacgcccagatgctcgtaatcggcaatataaacttctttatcttctttgttgaagatagccatcagcgtagcaaactcttcttccgtggtgccggagaaattccagtccacaaacggataatcggcatcctgcttgaacaggtcccaggagattaaaccgctggaatcgataaagtgcgtttcgaggttggtatgttcagcgacttcttcatcatcgaaggttggcggagtaaacacatccaaatctttcaggccacgaccttgcagcagctcggtcacggtacgttccagtgctacgccaaaatcaggatgcgyaccgaaagaggcaaagcaggtgccgttagcaggattaaacagtaccacgcaaatcaccggatactggccgccaagggaaccatcatatgcgaagatcgggaaaccttctgcttccagtgtttcgatcgcttcaaccaccgctgggtaacgcgccagcacgtctgccgggatttccggcaagctgatgctttcagcaataatgcggtttttcacgtagcgttcgaaaacttcggacaacccctgaacgcgtgcttcgttacgggtattgccagcagacataccgttagaaacgtacaggttaccaatgatattcatcggaatataaacggtctgattatcagactgacgtgtaaacggcagaccgcaaataccacgatcttcgttaccggattgtaggtcaatcagcatactgccggtcaattcattctccggatcgtaaaatgcgcgcagacgttcatcgagcagcccttctggcacatcgtcattttcggtcagtgggaaccatttttcgttgggataatgcacaaatggaccgttggcgatggtttcgcccagccagaaatcagcaaaaaagtagttggttgagagacgctcgaaatattcaccgagtgcagaagccagcgccgctttcttggttgcgcctttaccgttggtaaaacacagtgcgcactctntgtcgcgaatatgtacagaccagacgttaggcacgggattcagccaggaggcctcttcaatctgaaagccgaggtctgaaagtttttgctggaagcgagcgatggaatcttccagtgcggcatctttgccggggataaatgtttgcgtcatgaaaatcactttagtcgtacggaaagcgcgcaataatacgggttttatctcaaaggcgctatcaccgccgccatgccgatgaactgttgactatgcttttagcggataaaccacgttaagagcataaaaatgaaggcgttcgatctccaccgtatggcatttgataaagtgccttttgatttccttggcgaagttgcactacgtagtctttatacctttgtactggtctttttgttcctcaaaatgaccggaagacgcggtgtgcggcagatgtcgctgtttgaagttttaatcattctgacgctgggatcagcggcgggagatgtggcgttttatgatgatgtgccgatggtcccggtacttatcgtctttattactctggcgttgttataccgcctggtaatgtggttgatggcgcacagtgaaaaactggaagatcttctggaaggcaagccagttgtcattattgaagatggcgagctggcctggtcgaaactcaataactccaacatgacggaatttgagttctttatggagctacgattgcgtggcgtggagcagctggggcaggtncgtctggcgattctcgaaaccaacgggcaaatcagtgtctatttctttgaagatgacaaggtgaaatcgggtttacttattttacccagtgattgtacgcagcgttacaaagtggtgccggagtcggcggactatgcctgtattcgttgtagtgaaatcattcatatgaaagcgggggaaaaacaattatgtccgcgctgtgcaaatccagaatggacgaaggcaagtcgggcaaaacgggtgacctgacagtaaaaacatcggctttttgctaataatccgagagattcttttgtgtgatgcaagccacatttttgccctcaacggttttactcattgcgatgtgtgtcactgaatgataaaaccgatagccacaggaataatgtattacctgtggtcgcaatcgattgaccgcgggttaatagcaacgcaacgtggtgaggggaaatggctcaaatcttcaattttagttctggtccggcaatgctaccggcagaggtgcttaaacaggctcaacaggaactgcgcgactggaacggtcttggtacgtcggtgatggaagtgagtcaccgtggcaaagagttcattcaggttgcagaggaagccgagaaggattttcgcgatcttcttaatgtcccctccaactacaaggtattattctgccatggcggtggtcgcggtcagtttgctgcggtaccgnnnnntattctcggtgataaaaccaccgcagattatgttgatgccggttactgggcggcaagtgccattaaagaagcgaaaaaatactgcacgcctaatgtctttgacgccaaagtgactgttgatggtctgcgcgcggttaagccaatgcgtgaatggcaactctctgataatgctgcttatatgcattactgcccgaatgaaaccatcgacggtatcgccatcgacgaaacgccagacttcggcaaagatgtggtggtcgccgccgacttctcttcaaccattctttcccgtccgattgacgtcagccgttatggtgtaatttacgctggcgcgcagaaaaatatcggcccggcaggcctgacaatcgtcatcgtccgtgaagatttgctgggcaaagcgaatgtcgcgtgtccgtcgattctggattattccatcctcaacgataacggctccatgtttaacacgccgccgacatttgcctggtatctatctggtctggtctttaaatggctgaaagcgaacggcggtgtagctgaaatggataaaatcaatcagcaaaaagcagaactgctatatggggtgattgataacagcgatttctaccgcaatgacgtggcgaaagctaaccgttcgcggatgaacgtgccgttccagttggcggacagtgcgcttgacaaattgttccttgaagagtcttttgctgcaggccttcatgcactgaaaggtcaccgtgtggtcggcggaatgcgcgcgtctatttataatgccatgccgctggaaggcgttaaagcgctgacagacttcatggttgagttcgaacgccgtcacggttaatgccgaaattttgcttaatccccacagccagcctgtggggtttttatttctgttgtagagagttgagttcatggaatccctgacgttacaacccatcgctcgtgtcgatggcactattaatctgcccggttccaagagcgtttctaaccgcgctttattgctggcggcattagcacacggcaaaacagtattaaccaatctgctggatagcgatgacgtgcgccatatgctgaatgcattaacagcgttaggggtaagctatacgctttcagccgatcgtacacgttgcgaaattatcggtaacggcggtccattacacgcagaaggtgccctggagttgttcctcggtaacgccggaacggcaatgcgtccgctggcggcagctctttgtctgggtagcaatgatattgtgctgaccggtgagctgcgtatgaaagagcgcccgattggtcatctggtggatgcgctgcgcctgggcggggcgaagatcacttacctggaacaagaaaattatccgccgttgcgtttacagggcggctttactggcggcaacgttgacgttgatggctccgtttccagccaattcctcaccgcactgttaatgactgcgcctcttgcgccggaagatacggtgattcgtattaaaggcgatctggtttctaaaccttatatcgacatcacactcaatctgatgaagacgtttggtgttgaaattgaaaatcagcactatcaacaatttgtcgtaaaaggcgggcagtcttatcagtctccgggtacttatttggtcgaaggcgatgcatcttcggcttcttactttctggcagcagcagcaatcaaaggcggcactgtaaaagtgaccggtattggacgtaacagtatgcagggtgatattcgctttgctgatgtgctggaaaaaatgggcgcgaccatttgctggggcgatgattatatttcctgcacgcgtggtgaactgaacgctattgatatggatatgaaccatattcctgatgcggcgatgaccattgctacggcggcgttatttgcaaaaggcaccaccacgctgcgcaatatctataactggcgtgttaaagaaaccgatcgcctgtttgcgatggcaacagaactgcgtaaagtcggtgcggaagtagaagaggggcacgattacattcgtatcactccaccggaaaaactgaattttgccgagatcgcgacatacaatgatcaccggatggcgatgtgtttctcgctggtggcgttgtcagatacaccagtgacgattcttgatcccaaatgtacggccaaaacatttccggattatttcgagcagctggcgcggattagccaggcagcctgaatgaataacgtccaataaatagccaaaactttctttatcaaaacgtcggcacattgccggcgttttttttcggaccttgtgagtcattttgattaatggtagcgtcgcttgtcaatgtaagttgttgatacataatgtttgtatatgattaatcaacggatgattcacatgaagaatactaaattactgctggcgattgtgacctctgcagcattactgacggggtgtcaaaatacccacggtattgataccaatatggctatcagctccggtttaaatgcctataaagcagcaacgttaagcgatgccgatgcaaaagcgattgccaatcagggctgtgccgaaatggacagcggcaatcaagtcgcaagtaaatccagcaagtacggtaaacgtctggcaaaaatcgccaaagcattgggtaacaatattaatggcacgccggtcaactataaggtttatatgaccagcgacgtcaacgcatgggcgatggcgaacggctgtgttcgtgtttacagtggcctgatggacatgatgaacgataacgaaattgaaggcgttctgggccatgaactgggccacgtcgcgttgggtcactcgctggctgaaatgaaagcttcttatgcgatcgttgccgcacgcgatgccatttcagctaccagcggtgtggcttcccagctttcccgctcacaattgggtgatatcgcagaaggcgctatcaatgcgaaatactcccgcgataaagagtccgaagcagatgatttctcctttgatctgttgaagaaacgtggcatcagcacccaggggcaggttggcagctttgaaaaactggctagcctggatggcggtcgcacccagtccatgtttgactctcacccaccatcaacagagcgtgcgcaacacatccgtgatcgtatcgcctctggtaagtaaatcattgtcatctttcgggctggtcttctgccagcccgctataattgcncaataaatccccatctgaatacagacaaaactggtttttgcacacaacgttaacgatttgtggcgtcggcgcgtataatgcgcgcggttatgttaacggtacgcctgttttaaggagataaagatgacggcaattgccccggttattaccattgatggcccaagcggtgcagggaaaggcaccttgtgtaaggctatggcggaagcgttgcaatggcatcttctggattcgggtgcaatttatcgcgtactggcactagcggcattacatcaccatgttgatgttgcatcggaagatgcgctggtgccgctggcatcccatctggatgtacgttttgtgtcaaccaatggcaatctggaagtgatcctcgaaggggaagatgtcagcggcgaaattcgtactcaggaagtggcgaatgcagcttcacaagtcgcggcattcccacgcgttcgtgaagcattattgcgtcgccaacgcgcgtttcgcgaattaccaggcctgattgccgatggccgcgacatgggaacggtggtattccctgatgcgccagtgaaaattttccttgacgcctcctcggaagaacgtgcgcatcgccgcatgctacagttgcaggagaagggctttagtgttaactttgagcgccttttggccgagatcaaagaacgcgacgaccgcgatcgtaaccgagcggtagcgccactggttccggcagccgatgctttagtgttggattccaccaccttaagcattgagcaagtgattgaaaaagcgctacaatacgcgcgccagaaattggctctcgcataagcgaccgaatttgcagtacccccgttgcaatggaatgacagcgggtatgttaaacaaccccatccggcatggagccaggtggacgttaaatataaacctgaagattaaacatgactgaatcttttgctcaactctttgaagagtccttaaaagaaatcgaaacccgcccgggttctatcgttcgtggcgttgttgttgctatcgacaaagacgtagtactggttgacgctggtctgaaatctgagtccgccatcccggctgagcagttcaaaaacgcccagggcgagctggaaatccaggtaggtgacgaagttgacgttgctctggacgcagtagaagacggcttcggtgaaactctgctgtcccgtgagaaagctaaacgtcacgaagcctggatcacgctggaaaaagcttacgaagatgctgaaactgttaccggtgttatcaacggcaaagttaagggcggcttcactgttgagctgaacggtattcgtgcgttcctgccaggttctctggtagacgttcgtccggtgcgtgacactctgcacctggaaggcaaagagcttgaattcaaagtaatcaagctggatcagaagcgcaacaacgttgttgtttctcgtcgtgccgttatcgaatccgaaaanagcgcagagcgcgatcagctgctggaaaacctgcaggaaggcatggaagttaaaggtatcgttaagaacctcactgactacggtgcattcgttgatctgggcggcgttgacggcctgctgcacatcactgacatggcctggaaacgcgttaagcatccgagcgaaatcgtcaacgtgggcgacgaaatcactgttaaagtgctgaagttcgaccgcgaacgtacccgtgtatccctgggcctgaaacagctgggcgaagatccgtgggtagctatcgctaaacgttatccggaaggtaccaaactgactggtcgcgtgaccaacctgaccgactacggctgcttcgttgaaatcgaagaaggcgttgaaggcctggtacacgtttccgaaatggattggaccaacaaaaacatccacccgtccaaagttgttaacgttggcgatgtagtggaagttatggttctggatatcgacgaagaacgtcgtcgtatctccctgggtctgaaacagtgcaaagctaacccgtggcagcagttcgcggaaacccacaacaagggcgaccgtgttgaaggtaaaatcaagtctatcactgacttcggtatcttcatcggcctggacggcggcatcgacggcctggttcacctgtctgacatctcctggaacgttgcaggcgaagaagcagttcgtgaatacaaaaaaggcgacgaaatcgctgcagttgttctgcaggttgacgcagaacgtgaacgtatctccctgggcgttaaacagctcgcagaagatccgttcaacaactgggttgctctgaacaagaaaggcgctatcgtaaccggtaaagtaactgcagttgacgctaaaggcgcaaccgtagaactggctgacggcgttgaaggttacctgcgtgcttctgaagcatcccgtgaccgcgttgaagacgctaccctggttctgagcgttggcgacgaagttgaagctaaattcaccggcgttgatcgtaaaaaccgtgcaatcagcctgtctgttcgtgcgaaagacgaagctgacgagaaagatgcaatcgcaactgttaacaaacaggaagatgcaaacttctccaacaacgcaatggctgaagctttcaaagcagctaaaggcgagtaattctctgactcttcgggatttttattctgaagtttgttgagtttacttgacagattgcaggtttcgtcctgtaatcaagcactaagggcggctacggccgcccttaatcaatgcagcaacagcagccgcttaatttgcctttaaggaaccggaggaatcatgaccaagtcagaattgatagaaagacttgccacccagcaatcgcacattcccgccaagacggttgaagatgcagtaaaagagatgctggagcatatggcctcgactcttgcgcagggcgagcgtattgaaatccgcggtttcggcagtttctctttgcactaccgcgcaccacgtaccggacgtaatccgaagactggcgataaagtagaactggaaggaaaatacgttcctcactttaaacctggtaaagaactgcgcgatcgcgccaatatttacggttaagtttttactcaaacttgaacgagagaaaagcacctgtcgggtgcttttttcatttatctaatctggaactggaagctgcctcgcagagttttgagcagttttcaccctttcgttaaattcttctgaatgtgcctcggggaacgcaaaattcccaccagacaaccgctcaacaaagttgcacactttccataaacagggaggggtgcatgaaaataacgacagtcggcgtatgcataatttgcggaatttttccgttgctgattttgccccaattgcctgggacattaacccttgcgtttctgactctcttcgcctgcgtactggcatttatccctgttaaaaccgtccgttatatcgcgctgacgttgctgtttttcgtttggggcatattatcagcaaagcaaattttgttggcaggagaaaccttaactggcgcgacgcaggatgcaattgttgagatcactgctactgacggcatgaccactcattacggtcaaattacttatctacaaggtcaacgtatattccctgcgccaggccttgtgctgtatggcgaatatcttccgcaagcggtttgtgccggacaactgtggtcaatgaaactcaaagttcgtgccgttcatggtcaacttaatgatggcggctttgatagccagcgttatgccattgcccagcatcagccgctcaccggccgctttctgcaggcaagtgttattgaaccgaattgtagcctgcgtgcacagtatctggcgtcactacaaacaacgctgcaaccctatccgtggaatgcggttattcttggtttaggtatgggggaacggttatccgtccctaaagaaatcaaaaatatcatgcgtgatactggaacggcgcatttaatggcgatatcgggattgcacatcgcttttgcggcgttgctggctgccggactcattcgcagtggacaaatttttctgcctgggcgctggatccactggcaaatgccattaattggcggnatctgctgtgctgctttttatgcctggctgacgggaatgcaacctcctgcattgcgtaccgttgtggcgcttgctacgtggggtatgcttaagttaagtgggcgacagtggagtggctgggatgtatggatatgttgtctggcggcaattttgctgatggatcctgttgtcattctctcgcaaagtttatggctctctgccgctgcggtcgcggcattgatattttggtatcagtggtttccctgtcctgagtggcaactgccgccggtattgcgtgcagttgtttccctcatccatctgcaactgggaatcacacttctgcttatgcccgtgcaaatcgtcatatttcatggcattagtctgacctcgtttattgcaaatctattagcaattcccttggtgacatttatcacggttccgttgatcctcgccgcgatggttgtgcatttaagcgggccgttaatcctggatcaagggttatggtttcttgccgaccggtctttggctttacttttcttggggttaaagagtttgccagaagggtggatcaacattgctgaacgttggcaatggctatcattttccccatggttcttactggtggtatggcgattaaacgcctggcgaacgttgccagcaatgtgtgtggctgtaggcttgctgatgtgctggccgctgtggcaaaaacctcgacctgacgagtggcaagtgtacatgcttgatgtcgggcaagggctggcaatggtgatagccagaaacggcaaagcgattctctatgacacgggactggcctggcctgaaggggatagtgggcaacaactgattatcccctggctccactggcataatcttgaaccggaaggcgttatcctgagtcatgaacatctggatcaccggggagggctggactcaatattgcatacatggccgatgttatggatcagaagtccgttaaactgggaacatcatcagccctgtgtgcgtggcgaagcgtggcaatggcaaggattgcgtttcagcgcgcactggcctttacaaggtagcaacgataaaggaaataaccattcctgtgtggttaaggttgatgacgggacgaatagcattcttctaaccggtgatattgaagccccagctgaacaaaagatgctaagccgttactggcagcaagtgcaggcaacattgcttcaggtacctcaccatggcagtaatacctcatcatcattgccattaattcagcgagtgaatggaaaagtggcactcgcatcggcatcgcgctataacgcatggcgactgccctctaacaaagttaagcatcgctatcaacaacaaggttatacgtggcttgatactcctcatcaggggcaagtaacggtcgatttttcagcgcaaggctggcggattagcagcctcagggagccaattttacctcgttggtatcatcagtggtttggcgtgccagtggataacgggtagaatatgcggctatttcaacaaatgctggttttttgaatgcataacgacaaagatctctctacgtggcagacattccgccgactgtggccaaccattgcgccttttaaagcgggtctgatcgtggcgggcgtagcgttaatcctcaacgcagccagcgataccttcatgttatcgctccttaagccacttcttgatgatggctttggtaaaacagatcgctccgtgctggtgtggatgccgctggtggtgatcgggctgatgattttgcgtggtatcaccagctatgtctccagctactgtatctcctgggtatcaggaaaggtggtaatgaccatgcgtcgccgcctgtttggtcacatgatgggaatgccggtttcattctttgacaaacagtcaacgggtacgctgttgtcacgtatcacctacgattccgaacaggttgcttcttcctcttccggcgcactgattactgttgtgcgtgaaggtgcgtcgatcatcggcctgttcatcatgatgttctattacagttggcaattgtcgatcattttgattgtgctggcaccgattgtttcgattgcgattcgcgtagtatcgaagcgttttcgcaacatcagtaaaaacatgcagaacaccatggggcaggtgaccaccagcgctgaacaaatgctgaaaggccataaagaagtattgattttcggtggtcaggaagtggaaacgaaacgcttcgataaagtcagcaaccgaatgcgtcttcaggggatgaaaatggtttcagcctcttccatctctgatccgatcattcagctgatcgcctctttggcgctggcgtttgttctgtatgcggcgagcttcccaagtgtcatggatagcctgactgccggtacgattaccgttgttttctcttcaatgattgcactgatgcgtccgctgaaatcgctgactaacgttaacgcccagttccagcgcggtatggcggcttgtcagacactgtttaccattctggacagtgagcaggagaaagacgaaggtaagcgcgtgatcgagcgtgcgactggcgacgtggaattccgcaacgtcacctttacttatccgggacgtgacgtacccgcattgcgtaacatcaacctgaaaattccggcagggaaaacggtcgctctggttggacgctctggttcaggtaaatcaaccatcgccagcctgatcacgcgtttttacgatattgatgaaggcgaaatcctgatggatggtcacgatctgcgcgagtataccctggcgtcgttgcgtaaccaggttgctctggtgtcgcagaatgtccatctgtttaacgatacggttgctaacaacattgcttacgcacgaactgaacagtacagccgtgagcaaattgaagaagcggcgcgtatggcctacgccatggacttcatcaataagatggataacggtctcgatacagtgattggtgaaaacggcgtactgctctctggcggtcagcgtcagcgtattgctatcgctcgagccttgttgcgtgatagcccgattctgattctggatgaagctacctcggctctggataccgaatccgaacgtgcgattcaggcggcactggatgagttgcagaaaaaccgtacctctctggtgattgcccaccgcttgtctaccattgaaaaggcagacgaaatcgtggtcgtcgaggatggtgtcattgtggaacgcggtacgcataacgatttgcttgagcaccgcggcgtttacgcgcaacttcacaaaatgcagtttggccaatgatcgaaaaaatctggtctggtgaatcccctttgtggcggctattgctgccactctcctggttgtatggcctggtgagtggcgcgatccgtctttgctataaactaaaactgaagcgcgcctggcgtgcccccgtaccggttgtcgtggttggtaatctcaccgcaggcggcaacggaaaaaccccggtcgttgtctggctggtggaacagttgcaacagcgcggtattcgcgtgggggtcgtatcgcggggatatggtggtaaggctgaatcttatccgctgttattgtcggcagataccaccacagcacaggcgggtgatgaacctgtgttgatttatcaacgcactgatgcgcctgttgcggtttctcccgttcgttctgatgcggtaaaagccattctggcgcaacaccctgatgtgcagatcatcgtaaccgacgacggtttacagcattaccgtctggcgcgtgatgtggaaattgtcgttattgatggtgtgcgtcgctttggcaatggctggtggttgccggcggggccaatgcgtgagcgagcggggcgcttaaagtcagttgatgcggtaatcgtcaacggcggtgtcccccgcagcggtgaaatccccatgcatctgctgccgggtcaggcggtgaatttacgtaccggtacgcgttgtgacgttgctcagcttgaacatgtggtggcgatggcagggattgggcatccgccgcgcttnnnngccacgctgaagatgtgcggcgtacaaccggaaaaatgtgtaccgctggccgatcatcagtctttgaaccatgcggatgtcagcgcgttggtaagcaccgggcaaacgctggtaatgactgaaaaagatgcggtgaaatgccgggcctttgcagaagaaaattggtggtatttgcccgttgacgcacagctttcaggtgatgaaccagcgaaactgcttgcgcaactaacctcgctggcttctggcaactagttacgccgcggcagcgttcgattgatggagtcatgaatgtcgctgccgcacctctcccttgctgatgcgcgtaatcttcaccttgccgcgcaaggcctgttaaacaaaccccgccgtcgagcgtcgttggaggatattccggcaacgatctcccgcatgtccttgctgcaaatcgataccatcaatattgttgcccgtagcccatatctggtgcttttcagtcgtctgggaaattatcctgcccagtggctggatgagtctctggcgcgtggcgaattaatggaatactgggcgcatgaagcctgctttatgccacgcagtgactttcgtcttattcgccaccgcatgctggcacctgaaaaaatgggctggaaatacaaagacgcctggatgcaggaacatgaggcggaaattgcacagttaattcagcatattcatgataaggggccggtacgttcagccgattttgagtatcctcgtaaaggtgcaagcggctggtgggaatggaagccgcataaacggcatctggaaggtttatttactgccggaaaggtgatggtgattgaacggcgcaacttccagcgcgtttatgatttaacccaccgtgtcatgcctgactgggatgatgagcgcgatctcgtttcgcaaacagaagcagaaatcatcatgctggataacagtgcgcgtagcctgggaatattccgcgaacagtggctggcagattactatcggctgaaacgtccggcactggcagcgtggcgcgaagcgagggctgaacagcggcaaatcattgctgtgcatgttgaaaaattgggcaatctttggctgcatgctgatttgctgccgctactcgagcgagcgctggccggaaagctcactgcaacgcacagcgcggtactttcgccttttgatcctgttgtctgggatcgcaaacgcgcagagcagctttttgattttagctaccggctggagtgctataccccagcgccgaaacgccagtatggctattttgttctgccgttattacatcgtgggcaattagttgggcgaatggatgccaaaatgcatcgccagacaggcatccttgaagttatctctctgtggttacaggaaggtattaaaccaacgacaacgctgcaaaaagggttacgtcaggcgattactgatttcgctaactggcagcaggcaacgcgggtgacattaggacactgcccgcaaggtctctttacggattgccgcaccggctgggaaatagaccccgtcgcataaatgattatgataagatttatgcattcataacccgatccatctggaggaactatggatcatcgtctgcttgaaatcattgcctgcccggtttgcaacggaaaactttggtataaccaggaaaaacaagaacttatttgcaaactggacaacctggctttcccgctgcgcgatggcattccagtgttgctggaaacggaagcccgcgtgctgactgctgatgagagtaaatcatgagttttgtggtcattattcccgcgcgctacgcgtccacgcgtctgcccggtaaaccattggttgatattaacggcaaacccatgattgttcatgttcttgaacgcgcgcgcgaatcaggtgccgagcgcatcatcgtggcaaccgatcatgaggatgtcgcccgcgccgttgaagccgctggcggtgaagtatgtatgacgcgcgccgatcaccagtcagggacagaacgcttggcggaagttgtcgaaaaatgcgcgttcagcgacgacacggtgatcgttaatgtgcagggtgatgaaccgatgatccctgcgacaatcattcgtcaggttgctgataacctcgctcagcgtcaggtgggtatggcgactctggcggtgccaatccacaatgcggaagaagcgtttaacccgaatgcggtgaaagtggttctcgacgctgaagggtatgcactgtacttctcacgcgctaccattccgtgggatcgtgatcgttttgcaaaaggccttgaaaccgttggcgataacttcctgcgtcatcttggtatttatggctaccgtgcaggctttatccgtcgttacgtcacctggcagccaagcccgttagaacacatcgaaatgttagagcagcttcgtgttttgtggtacggcgaaaaaatccatgttgctgtcgcgcatgaagttcctggcacaggtgtggatacccctgaagatctcgagcgcgttcgcgctgaaatgcgctaatttcacttcacgacacttcagccaattttgggaggagtgtcgtaccgttacgattttcctcaatttttcttttcaacaattgatctcattcaggtgacatcttttatattggcgctcattatgaaagcagtagcttttatgagggtaatctgaatggaacagctgcgtgccgaattaagccatttactgggcgaaaaactcagtcgtattgagtgcgtcaatgaaaaagcggatacggcgttgtgggctttgtatgacagccagggaaacccaatgccgctaatggcaagaagctttagtacgcccggaaaagcccgacaactggcatggaaaaccaccatgctggcaagaagtgggactgtccgtatgccgactatttatggtgtgatgacgcatgaagaacaccccggccctgatgtcctgctactggagcggatgcgtggtgtttcggtggaggcaccagcccgaacaccagaacgttgggaacagctcaaagaccaaatcgttgaagccttactggcctggcaccgtcaggacagtcgcggttgcgtcggcgcggtcgacaatactcaggaaaatttctggccctcatggttccggcaacatgttgaagtgctatggaccacgctcaatcagttcaataacaccggtctgacgatgcaggataagcggatcctgtttcgcactcgcgaatgtctcccggcattatttgaaggttttaacgacaattgtgtgctgattcacggtaacttctgtttacgcagcatgttgaaagattcgcgcagcgatcagttactggcgatggtcgggccgggactaatgctttgggcaccgcgagaatacgaactgttccgactaatggataattctctggcggaagatttgctctggagttacctgcaacgcgcgccagtggcggagtcgttcatctggcggcgttggttgtatgtgttatgggatgaagttgcgcaactggttaataccggacgatttagtcggcgcaacttcgatctggcatcaaaatcactcttgccgtggctcgcctgacgaaccttttagccactgccagatgcggccaagcgtttcatagccaacacgatcgctatgcatcaaccagaccggagaagggattgcccgttcccacgggttaagcggcgagtcgatggccaactgattcgccggggctggtagtggatttaacccttcctgctgaaaaaagatcatcgcccgcggcagatgtgatgcggaggtcaccagcaggaaaggggcgtcaccaatcgcctgtttcactgccgcagcttcttcttcggtatcttttggcaaatccagggtgataatttgctcgcgcggtacgcccagcgattgcgcaactctggcacctacttccgctgtactcaccgtattggtttttgctacgcctcccgtgaagatcagttttgaacccggattttcgcgccataaacggataccctcattcaggcgtggcagactgttattgattaaattagagctcggtgcccactgcgggttccaggtataaccacctccgagcaccacgatatagtccactttttgcgaattattccatgtcggataggtgctttcgatgggacgcagcaggcggtcggctaccggttgcaaactcaataacaagagtgccagccacccaatgctaataaaaatcttcccggttttttgaaaacggctaaaccacagtagcgccaggccagcgccaataattaacaacatcagcggaagtggcagcaacatattgccaatcacttttttcagtgtaaaaagcatcctttctggttccttttttaaccatatagcaagggatcgccagcgatattacaccagacgggttcattctcgccgtggctgtgacaaaatagcgtctttatcagaaaacgtcttagccaaccggtggagaaagcaatgcaggatcgcaattttgatgatattgcggaaaagttttcccgtaacatttacggcaccaccaaagggcagcttcgacaggctattctgtggcaggatctcgatcgcgtgctggcggaaatgggtccgcaaaaactgcgtgtgctggatgcgggcggtggagaagggcagaccgcaatcaaaatggccgagcgcgggcatcaggtcattttatgcgatctttctgcgcagatgatcgaccgcgcaaaacaggcggcagaagcaaaaggtgtgagcgacaacatgcaatttatacattgcgccgctcaggatgttgcttcgcatttggaaacgcccgttgatctgatattgttccatgcggtgctcgagtgggtggctgatccccgcagcgtattgcagaccctgtggtcagtgttgcgtccaggcggcgtgttgtcgttaatgttctacaatgcgcatggtttgttgatgcataacatggtcgccggnaattttgattacgtgcaggcgggaatgccgaaaaagaaaaaacggacgctttcgccagattatccacgcgacccgacgcaggtttatctgtggctggaagaagctggttggcaaattatgggtaagacaggcgttcgcgtgtttcatgattatctgcgcgagaagcaccagcagcgcgactgctatgaagcattacttgaattagaaacgcgttattgccgtcaggaaccgtatattaccctggggcgttatattcatgtcaccgcgcgcaaaccgcagagcaaggataaagtatgagtgaattttcccagacagtccccgaactggttgcctgggccagaaaaaatgacttctccatttcgctaccggtagaccgactctcttttctgctggcagttgccacgctgaacggcgagcgtctggatggtgagatgagtgaaggcgagctggtggatgcattccgccatgtgagtgatgcgtttgagcaaaccagcgaaaccatcggcgtgcgcgccaacaacgcgatcaacgacatggtgcgtcnacgtctgctgaaccgctttaccagcgagcaggcagaagggaacgcaatttaccgtctgacgccgctcggcatcggcattactgactattacatccgtcagcgcgagttttctacgctgcgcctttctatgcagttgtcgattgtggcgggtgagctcaaacgcgcagcagatgccgccgaaganggcggtgatgaatttcactggcaccgtaatgtctatgcgccactgaaatattcggtagcagaaattttcgacagtatcgacctgacgcaacgtctgatggacgaacagcagcagcaggtgaaggacgatatcgcccagttgctgaacaaagactggcgggcggcgatttccagctgtgaattgttgctttcggaaacttccggaacgctgcgtgaattgcaggatacactggaagcggcaggcgacaaattgcaggctaatctgttgcgcattcaggatgcgacgatgactcatgacgatctgcatttcgtcgatcgtctggtgttcgatctgcagagcaaantcgaccgtattatcagttggggccagcaatccatcgatttgtggattggctacgaccgccacgtacataaatttattcgtaccgcgatcgatatggataaaaaccgcgtctttgctcagcggttacgtcagtcggtacaaacctattttgatgagccgtgggcgctaagttatgccaatgccgatcgtctgctggatatgcgtgacgaagagatggcactgcgcgatgaagaagtgactggggaacttccgccagatttggaatacgaagagtttaacgagatccgcgaacagctggcggcgatcatcgaagaacaacttgccgtgtacaaaaccagacaagtgccgctggatcttggtctggtggtacgcgaatatctgtcacagtatccgcgtgcacgtcactttgacgttgcgcgcattgttattgatcaggcggtacgtcttggcgtagcgcaagcagatttcaccggactgccagcgaaatggcagccgattaatgattacggagccaaggtacaggcgcatgtcatcgacaaatattgaacaagtgatgccggttaagctggcgcaggcgctggcgaatccgttatttccggcgctggacagcgccttacgttcaggccgccatattggcctcgacgaactggataatcatgcattcctgatggattttcaggaatatctggaagagttttacgcgcgttataacgttgagcttattcgtgcaccggaagggttcttctatttacgtccacgttccaccacgctgatccctcgttccgtcttgtcggaactggatatgatggtcgggaaaatcctctgttatctctatctcagcccggaacggctggcgaatgaggggattttcacccagcaggaactgtacgacgaactgctcaccctggccgatgaagcgaaactgctgaaactggtgaacaaccgttcaaccggttcagacattgaccgtcagaagttgcaggaaaaagtacgttcttcgctcaaccgtctgcgtcgtttaggtatggtgtggtttatgggccacgacagcagcaagttccgcattaccgaatcggtgttccgcttcggagccgatgtgcgtgctggcgacgatccccgtgaagcacagcgtcgcctgattcgtgatggcgaagcaatgccgattgaaaatcatctgcaactcaacgatgaaaccgaagagaatcagccagatagcggagaggaagaataatgattgaacgcggtaaatttcgctcactgacgctgattaactggaacggcttctttgcccgaacttttgaccttgacgagctggtcacgacgctttctggcggtaacggggcgggtaaatccaccaccatggcggcgttcgttacggcgctgatccccgacctgaccctgctgcatttccgtaacactacggaagccggggccaccagcggttcgcgcgataaaggtctgcacggtaagctgaaagcgggtgtctgttattcgatgctcgacaccattaactcgcgccaccagcgcgtggtggtcggtgtgcgtctgcaacaggttgccggacgcgatcgtaaagtggatatcaaaccatttgccattcagggactgccgatgtcggtgcagccgacacagctggtgaccgaaactctgaacgaacgccaggcgcgcgtgctgccgcttaacgagctgaaagacaagctcgaggcgatggaaggcgtgcagtttaaacagttcaactccattaccgattaccactcgctgatgttcgatctgggcatcattgcgcgtcgtctgcgctccgcatctgaccgtagcaaattctatcgtctgatcgaagcttcgctgtatggcgggatctccagtgccattacccgttctctgcgcgactacctgttgccggaaaacagcggcgtgcgtnaagcgttccaggacatggaagcggcgctgcgtgaaaaccgcatgacgctggaagcgattcgtgtcacccagtcggaccgtgacctgtttaagcatctgatcagcgaagctaccaactacgtggcggcggactacatgcgtcacgccaacgagcgccgtgtccatctcgataaggccctggagtttcgtcgcgaactacatacttcgcgtcagcaactggcggcggagcagtacaaacacgtcgatatggcgcgtgagctggcagagcacaacggtgccgaaggcgatctggaagcggattatcaggcggccagcgatcacctgaacctggtgcaaaccgcactgcgtcagcaggagaagatcgaacgctacgaagcggatctcgatgagctgcagatccgtctggaagagcaaaacgaagtggtggcagaagccatcgaacgccaggaagagaacgaggctcgcgcggaagctgccgaactggaagtggacgagctgaaaagccagcttgctgactaccagcaggcgctggacgtccannaaangcgcgcgatccagtacaaccaggcgattgctgcgcttaatcgtgccaaagaactgtgccatctgccggacttaaccgccgacagcgccgccgaatggctggaaaccttccaggcgaaagagctggaagcgactgaaaaaatgctctctcttgagcagaaaatgagcatggcgcaaaccgcgcacagccagtttgagcaggcttatcagctggtggtggcaatcaacggcccgctggcgcgtaacgaggcgtgggatgtcgctcgcgaactattgcgcgaaggggtcgatcagcgtcacctggcagagcaggttcagccgttgcggatgcgcttaagcgaactggaacagcgtctgcgcgaacagcaagaagctgagcgtctgctggcagatttctgcaaacgtcagggcaagaattttgacattgacgagctggaagccctgcatcaggagctggaagcacgcattgcctctctttccgatagcgtgtctaacgcccgtgaagagcggatggcactgcgccaggagcaggaacagctgcagtctcgcattcagagtttgatgcagcgtgcaccggtttggctggcagcgcaaaacagtctcaaccagttgagcgaacagtgcggcgaagagttcacctccagccaggacgtcactgaatatctgcaacagttgctggagcgtgagcgcgaggccattgttgaacgcgatgaagtaggcgcgcgcaaaaacgccgtcgatgaagagatcgaacgtttaagccagcctggcggctctgaagatcagcgtctgaacgcgctagcggagcgttttggtggtgtgctgctgtcagaaatttatgacgacgttagcctggaagatgcgccgtacttctcagcgctgtatggcccgtcacgccacgccatcgtggtgccagatctgtcacaggtaaccgaacacctggaaggtttgaccgattgcccggaagatctctatttgatcgaaggggatccgcagtcattcgatgacagcgtgttcagcgttgatgagctggaaaaagcggtagtggtgaaaatcgccgatcgtcagtggcgttattcacgtttcccggaagtgccgctgtttggtcgtgctgcgcgtgaaagccgtattgaaagcctccatgccgagcgtgaagtgctttccgaacgcttcgccacgctctcctttgatgtacagaaaacccagcgtctgcatcaggcgttcagccgctttatcggcagtcatctggcggtggcgtttgagtctgacccggaagcagaaatccgtcaactgaacagccgtcgcgtcgaactggagcgggcgttgagtaatcatgaaaatgataaccagcagcagcgtattcagtttgagcaggcgaaagaaggcgttacggcgctgaaccgcattctgccgcgtctcaacctgttggctgatgacagcctggcggatcgcgtcgatgaaatccgcgaacgtctggatgaagcccaggaagccgcgcgttttgttcagcagtttggcaatcaactggcgaaactggaaccgatcgtttcggtattgcagagcgacccggaacagttcgaacagttaaaagaagattacgcgtactctcagcagatgcagcgcgatgcccgtcagcaggcgtttgccctgacggaagtggtgcagcgtcgtgcgcactttagctactctgactcggcagaaatgcttagcggtaacagcgatctcaacgaaaaactgcgtgaacgtctggaacaggcggaagcggagcgtacccgcgctcgcgaagcgttgngcggtcacgcagcgcagttgagtcagtacaaccaggtgctggcttcgctgaaaagttcttacgacaccaaaaaagagctactcaacgatctgcaacgtgaattgcaggatatcggcgtgcgtgctgatagcggggcagaagagcgggcacgtattcgccgtgacgagctgcatgcacaactgagcaataaccgttcgcgccgcaatcaactggaaaaagcgctcaccttctgcgaagcggagatggacaacctgacccgcaaactgcgcaagctggagcgtgattactttgagatgcgcgagcaggtagtgaccgcgaaagcgggctggtgtgcagtcatgcgcatggtgaaagataacggcgttgagcgccgcttacaccgtcgtgagctggcttatctctccgctgatgatttgcgttccatgtcggataaggcgttaggtgcgctgcgtctggcggtggcggataacgaacatctgcgcgacgtgctgcgcatgtcggaagatcccaaacgtccggagcgtaaaattcagttcttcgtggcggtttatcagcatctgcgtgaacgtattcgtcaggatattattcgtaccgatgatccggtggaagctatcgaacagatggagatcgaacttagccgtctgaccgaagagttaacctcccgtgaacagaaactggcgatcagttcccgcagcgtggcgaacatcattcgcaaaaccattcagcgcgagcagaaccgtatccgtatgctcaaccaggggttgcagaacgtatcgtttggtcaggtgaacagcgtgcgcctcaacgtgaacgtgcgtgaaacgcacgccatgctgctggatgtgctctctgaacagcatgagcagcatcaggatctgtttaacagcaaccgtctgaccttctcggaagcgctggcgaaattgtatcagcgtcttaatccgcagattgatatggggcagcgcacgccgcagaccattggcgaagaactgctggattaccgcaactatctggaaatggaagttgaggttaaccgtggttccgatggctggttgcgcgcagagtctggtgcattgtcgaccggtgaggcgattggtaccggtatgtcgattctggtgatggtggtacaaagctgggaagatgaatctcgccgcctgcgcggtaaagatatctctccttgccgcctgctgttcctcgatgaagcagcgcgactggatgctcgttctatcgccacgctgtttgaattgtgtgagcgtttgcaaatgcagctcatcatcgcagcgccggaaaatatcagcccggagaaaggcaccacctataaactggtgcgtaaagtcttccagaataccgaacatgttcatgtcgtcggcctgcgaggatttgcgccgcaactccctgaaacgcttccaggaagtgacgaagcgccttctcaggcgagttaaaattaaggcggcagcaatgccgccttttctttttccgaaaactccgtttctgcactaaaaaagtggcacattacggcgcgcttttctttaaacttctttacattaggttatgtaaaaacgtatcggcgtttatatactgaagataagcctgatgagtaacaggcttgctcgtcatactttcgtgagtattggcgttgtacaggcaagtcgtaaaataacagcctggctattcagagtatgataaaaacagggggcaagggatgttgcttaatatgatgtgtggtcgtcggctgtcggcaatcagtttgtgcctggccgtaacattcgctccactgttcaatgcgcaggccgatgagcctgaagtaatccctggcgacagcccggtggctgtcagtgaacagggcgaggcactgccgcaggcgcaagccacggcaataatggcggggatcctgccattgcctgaaggtgcggcagaaaaagcccgcacgcaaatcgaatctcaattacccgcaggttacaagccggtttatcttaaccagcttcaactgttgtatgccgcacgcgatatgcaacccatgtgggaaaaccgtgatgctgttaaagccttccagcaacagctggcagaggtggcgattgccggtttccagccgcagtttaataaatgggtagagttactgaccgatcctggtgttaacgggatggcacgcgacgtggtgctctctgatgcgatgatgggctatctccatttcattgcaaatattccggtcaaaggcactcgctggctatatagcagtaaaccttatgcgcttgcaacgccgccgctttcggtgattaaccaatggcagcaggcgctggataaaggtcaattgcctacgtttgttgcaggactggcaccgcagcatccgcaatatgcggcgatgcatgaatcgttactggccttactcagtgacaccaaaccgtggccccaactgaccggcaaagcaacgttgcgcccagggcagtggagtaacgacgtaccggcgttgcgtgaaatattgcaacgcacaggcatgttggacggggggccgaaaattactctacctggcgatgacacgccaactgacgcggtagtcagcccatccgctgttactgttgaaacagcagaaactaagccgatggataagcaaacgacgtctcgtagtaaacctgcgcctgccgttcgcgccgcctacgataatgaactggtggaagccgttaaacgttttcaggcatggcaaggattgggggcagatggtgctattggcccggcaacgcgtgactggttaaacgtaacgcccgcccagcgtgctggcgtgttggctctcaacatccagcgattgcgcttgctgccaacagagctttctaccgggatcatggttaacattccggcctattcgctggtntactatcagaacggcaatcaggtgctggattcgcgagtcattgtcggtcgccccgatcgcaaaacgccgatgatgagcagtgcccttaacaatgtagtggtaaacccgccgtggaacgtacctccaactctggcacgcaaagatattctgccgaaagtgcgcaacgatccgggatatctcgaaagccatggctatacggtgatgcgcggctggaacagcagagaagcgattgacccatggcaggttgactggtctacaatcacggcctcgaatttaccgtttcgcttccaacaggctccaggcccacggaactcgctggggcgctataaattcaatatgccgagttcagaggccatttatttgcatgacacgccgaaccacaatctgttcaagcgtgatacacgcgcattgagctcaggctgtgtacgagtgaataaagcttccgatctggcgaatatgctgttgcaggatgcaggctggaatgacaaacgtatttctgatgcgctgaagcagggtgatacacgttacgtcaatattcggcagtcgattccggtgaatctctactacctgacggcctttgttggtgcagatggtcgtacccagtatcgtacagatatttacaattatgatctgcctgcgcgatccagctcgcaaatcgtatcgaaagcggaacaattaatcaggtaaatgaagtagttcggggaaatcagttgtcgtaataattagcatgattgggggcaattctctgcagcccccgtcactgctggggttgagtcatcttgacgtctgctttacgggcggttaaggtgcctcttgtgcgccagaagtgcatataaacgataacattgacctgtagacttgattatcatggacaaattcgacgctaatcgccgcaaattgctggcgcttggtggcgttgcantcggtgccgccatcctgccgacccctgcgtttgcaacactctctaccccacgcccgcgcattttgacactcaataatcttcataccggagagtcaatcaaagcggagtttttcgatggcagaggctatattcaggaagaattggcaaaacttaaccattttttccgcgattaccgcgcgaacaaaataaagtccatcgacccaggattattcgaccagttgtatcgcctgcaagggttattaggcacccgcaaaccggtgcaactcatttccggttatcgttccattgataccaacaatgaactacgcgcccgcagccgtggagtagcgaagaaaagctatcacactaaaggccaggcgatggatttccatattgaaggtatcgcgttaagcaatattcgcaaagccgcgttatctatgcgcgcaggtggtgtaggatattacccacgtagtaactttgtgcatattgataccgggccagcacggcactggtagtaattgcttaacgaaacaggggcagtatgaactatcgtattattccggtcaccgcattctcccagaactgttcattgatctggtgtgaacaaacccgcctggccgcactggtcgatcctggcggcgatgcggaaaaaatcaaacaggaagttgacgccagcggcctgacactgatgcagatcctgctgacgcatggtcatctggaccacgttggcgcagcggcggaactggcgcaacattacggcgtgccggtttttggcccggaaaaagaagatgagttctggctgcaaggcttgcctgcgcaaagtcgtatgtttggtctggaagagtgccagccgctgacgccagatcgttggctgaacgaaggcgataccatcagcatagggaatgtgactttacaggtgttacattgccctgggcatacgccgggtcatgtcgtgttttttgatgatcgggcaaagctgctgatttctggcgatgttattttcaaaggcggagtagggcgcagtgacttcccgcgtggcgatcataatcaactgatttcttcaatcaaagataaattgctgccactgggtgatgacgtgacatttattccgggtcacggaccattatccacacttggttatgaacgcctgcataatcccttcctgcaagacgaaatgcccgtctggtaaggcacacataaaaaagcccgcttttcagcgggcttcattgtttttaacgcttacagcactgccacaatcgcttcgcacagcggagccatgttatctggtgtcatcccggccacgtttacgcgaccagaagcaacagcatacacgccaaactcttcgcgcagacgcagcacttgttcttttgtcaggccactgaaggagaacatgccgttctgtttgatgataaagctgaagtcgcggtttgcgcctttttcctgcagcgtattgacgaacaactgacgcatacgctgaatacgctggcgcatatcagtcagctcttgttcccaaatcgcacgtaacgcatcgttgctcaggatggtggcaacaacagaagcgccgtgtgctggtgggttagagtagttagcgcgaatcgccgctttcatttggctgaatgcgcgatcaacggtttcactgtcggcagcaaccagagtacaagcgccaacacgctcgttgtacaggccaaagtttttagagtaggaactggcaacaatcagctctttatgcatagccgcgaaagcgcgcagtccttcagcatcttcttccagaccacgggcaaaaccctggtaagcgaagtcaaacagcggtaaccagcctttctcaacggagagttgtgccagtgtctgccattgttccagcgtagggtcgataccggttgggttgtggcagcagccatggaacagcactacgtcgccagcctgagcttcgttcaggctgttaatcagtgcatcgaagtcaagggtgtggttttccgcatcataataagcgtattcacgaacttccagatctgcagagttaaagacgctcttatggttcggccagcttgggttgctcacccacactcgcttaacgctggtattttttgccaggaaatcggcagctatgcgtagtgcgccagtgccacccggagtctgtgccgtgcgagcacgtttgtcattgatcagggcgctacctttaccaaacagcagttcctgagtgcagcgaccaaattcagggatgccgtcaatgccgaggtaatttttggtggtttcattttcgagcagatactgttcagcctttttcacgctggtcagtaccggggttttgcccgtctcatctttatagacaccaatcccgaggttaattttgccgggacgttcatcggcacgaaacagatcggccaggcccagaatcgggtcggcaggagcggcggtaatgttctcaaacatgacgaggttccattatggttacagaagggaagtccgctatcagggtaacgggagatttacaaaattccaactattactgatgaaaacgcaggctgtttttgcaagacgtgagattgctctggaaggcataaaaaaaacaggaccaaagtcctgttttttcggcatttaacaaagaggtgtgctattagaactggtaaacgatacccacagcaacggtgtcgtctgaacctacgcccagtttgttgtcagaatcgatctggttgatgatgtagtcaacataggtggacatgtttttgttgaagtagtaggttgcgcccacttcaaagtagttcaccagatcaacatcaccgataccttctacgtctttcgctttagatttggtgtaagcgatggacggacgcagaccgaaatcgaactggtattgcgcaactaacagaacgtcttgcgttttgttggcgaagccgctgatgtttgtaaatttattagtgatcggcgtagcgttacgcgtttcaccgtagttcgctgccaggtagatgttgttcgcatcatacttcagaccagtagcccactgttcagcttttttaccgttgccaagaagttgagcttcttgcaggttggtacggtcagctgcaccataagcaccaacgataccaaagccttcgtattcgtagctgataganccgccaacaccgtcgccgttagagcggcgtgcagtgtcacgctcgtttttacccaggtactgaacagcgaagttcaggccatcaaccagaccaaagaagttggagttacgataggtagcaacgccgccaacacgaccaacgaagaagtcatcgctgtatgcagtatcaccaccaaattctggcagcatatcggtgtaacccagtgcatcataaaccacaccgtagttacggccgtaatcgaaagaaccaacgtcagcgtatttaagacccgcgaatgccagacgcgttttgttaccagtttgagcgtcagcgccttcagagttgttaccctggaagttatattcccactgaccataaccggtcagatcggaattgatttgagtttcccctttaaaaccaagacgggcataggtcatgtcgccattgccaccgtaactgttttcaccgttacccttggagaaataatgcagaccgacagctttaccgtacagatctactttgttgccatctttgttatagatttctgcagcgtttgcagtacctgctactaacagagcagggacgatcactgccagaatattgcgcttcatcattatttattaccctcatggttttttttatgacacctgccactgccgtcaataatttctgtcaataaaattttacggaactattgatgagagtttggtgtctttatgtgtctgcaggcatctttccattcaaactaacgtttcgctaccgtgaaagtgctacaaagataaagatttagtttcaaaaagaaaaaatatgtaactaaaagtaaaaattaaggaactttgtgaacaccgtcatatttccatagaggcgtgatgatatttacagcaatttttatctatttatatgatttccttatatttaaattaactaaacggaaattttgtttctgatggaaactttatcgacctggcccaaaatcctctttcagacatccagaatgccaaaaaaatagtatgaaaattgtgctatcagctaagaaaaaactaatccgcaataagaatgcgggttattttttgtgcgtaaatgttgcaatgtaatattccgtaacaggatgatcgttatggcggggttgcaaatagattgattgacttaacaaacagataacttgacagaaaggataaaaaagagccagcgggtgctggctcttgtagacgctaaattagaagctggcgttacgcggagttcgtgggaacggaatcacatcacgcacgttttgcacaccagttacgtaagcaatcaggcgttcaaaaccaagaccgaaaccggaatgcggaacagtaccgtagcgacgcagatcgcgataccaccagtaatcttctttgttcaggcccatttccagcatacgctcgtccagcacgtccagacgctcttcacgctgggagccaccaatgatctcaccgatgcccggagccagaacatccatagccgcaacggttttaccgtcttcgttgaggcgcatatagaacgctttaatatctttcggatagtttttaaccactaccggtgctttaaagtgttcttccgccagataacgctcatgctcagaagagagatcgacgccccagtaaaccgggttttcaaacttcctgccgcagttttcgagaatggttactgcttcggtgtaatccacctgcgcgaaatcggcctcaataaagcgttccagacgagaaacggcatctttatctacgcgttcagcgaagaatttcatgtcgtcagcgcgttcttcgagaaccgctttgaagacatatttcagcatggcttcagccagacccgcgatatcgttcaggttagcaaacgccacttccggctccagcatccagaattccgccaggtgacggctggtgttggagttttcagcacggaaagtcgggccgaaggtataaattttggataatgcgcaagcgtaggtttcgccgttcaactggccagatacggtcaggaaagactctttaccaaagaagtctttgtcgaaatccactttgccctgatcgttacgcggcagattttccagatccagcgtagaaacgcggaacatttcgccagccccttcggtatcagacgcagtaatcagtggcgttgaaacccagaagaatccctgctcgttaaagaagcgatgcagcgcctgcgccagcgtatggcgaacgcgcgcgacggcaccaatcaggtttgtgcgcggacgcaggtgagcgacttcacgcagatactcaatgctgtggcgttttgccgccatcgggtaagtgtctggatcttcaacccaaccagcaacttcaaccttgctggtctgaatttcaaattgttgcccctggcccggcgacgccacgactttacccgtcacaatgaccgagcagccggtggtcagacgcaggacgtcttcattgtaattgggcagagaattattgatgacagcctgtacaggatcaaagcaggaaccgtcataaacggcgaggaaggagatgccagcttttgaatctcggcgggtacgtacccatccgcgtacggtgacttcgctgtcaacggctacgcggccctggagtacgtcggctacaggcacaacgctcataatattctctctgttaatagtcggaaaaaataaacacttgtccacccgtaaatggggggatacctatgttacctggcatctgcaatcagacaagcagaattcgcaaatgcagcgaaagatttcggaattaaaggtaaaaaaagggagccgattagctccctgatgatattaactggcttttttantatgcggaaggtcgaacgctttgcgcagcgcccgaacaaacgctttatcatggcagatagttttgccagggctgtcagaaagtttcgccaccggtttaccgttacactctaccaacttaatcacaatattcagggggtttacctgggggatatcgcaggtcaggcgagtcccaataccaaaacttaattgcacgcgggaagagaagtggcggtatagctcaaccgctttgcgtaaatccagattgtcagagaaaaccagcgttttactctgtggatcaatttccagcttttcataatgtgcaatggctttttcaccccattcaaccgggtcgccagagtcatgacgcaggccctgataccgactagcgaactcgacaccgaaatcacgcaggaaagcatccatagtgatgcagtcggttaatgcaatgccaagttggtcgggatactcttccagccaggcagcaagtgcagctcgctggctgttggctagatccgggctgatttgctgatgtgcctggaaccattcgtgtgcctgtgttcccatcggcgtgagggaaagccgacgcgccagatcgtagttgctggtgcccacgaaccaggattcctgttgcagacgcttaacgatggtttcttgtacttcgcgagaaaaacggcgacgggtgccaaaatccatcagatggaagcgcgacatatcaagaccagcggttaacgccgagaagtcgactaatttgctttccagcgtgtcgagggcttgcgcaacgtcggcctgcggtgagcgatagcgatgtaccatttcactgataaccgccagcaaaggaacttcccagaggatgacttcacgccacgggccgcttaaacgaatatccagcttgccattatcgttggacacggtgacttgttccgggttaaagcggaactcgcgtaaccagttaagatagtcggccttaaagaaaggcagggcagaaagccactgatattcatcatcctgcaggcgcaggtgctgcatcgcctgaacctgttcacgaatagcatcggcataaatacccagcagatcgtcacctcggcaacgaaactccgccgcgacatgcacatcgtaataatgatgaaacacggcttgctgcatatgcaacttataagcatctgtatccagcaacgagtgcagaacaggagaagcgaattgtgtcataggtgcgcagtagcgtcctcgtacaggagcgtttagtacaataaacatcttcaggaactgctggagtataccttgtttcgcaatttattgaaccccgatcacaccatatgccacctttctggtcgatggcattacgcggtgtatgttataaaaatgtagcaataaaggcgtttgtacctgaaaagatgaagattctgcatagcgcgatttacgcaacaggaatagactgaacaccagactctataaaagatgctaaaggttatttatgactcaacagccacaagccaaataccgtcacgattatcgtgcgccggattaccagattactgatattgacttgacctttgacctcgacgcgcaaaagacggtcgttaccgcggtcagccaggctgtccgtcatggtgcatcagatgctccgctttgtctcaacggcgaagacctcaaactggtttctgttcatattaatgatgagccgtggaccgcctggaaagaagaagagggcgcactggtcatcagtaatttgccggagcgttttacgcttaagatcattaatgaaataagcccggcggcgaatacggcgctggaagggctttatcagtcaggcgatgcgctttgcacccagtgtgaagccgaaggtttccgccatattacgtattatctcgaccgcccggacgtgctggcgcgttttaccaccaaaattattgccgataaaaccaaatatcccttcctgctttccaacggtaaccgcgttgcgcaaggcgaactggaaaacggacgccattgggtacagtggcaggacccgttcccgaaaccgtgctacctgtttgcgctggtggcaggcgactttgatgtactgcgcgatacctttaccacgcgttctggtcgcgaagtagcactggagctgtacgtcgatcgcggcaaccttgatcgcgcgccgtgggcgatgacctcgctgaaaaactccatgaaatgggatgaagaacgctttggcctggagtatgacctcgacatctatatgatcgtcgcggtggatttcttcaatatgggcgcaatggagaataagggtctgaatatctttaactccaaatatgtgctggcccgcaccgataccgccaccgacaaagattacctcgatattgaacgcgttatcggccatgaatatttccataactggaccggtaaccgagtgacctgccgcgactggttccagctcagcctgaaagaaggtttaaccgtcttccgcgatcaggaattcagctctgaccttggttcccgcgcggtaaaccgtatcaataatgtgcgcaccatgcgcggattgcagtttgcggaagacgccagcccgatggcgcacccaatccgcccggacatggtcattgagatgaacaatttctacaccctgaccgtttacgagaagggcgcggaagtgattcgtatgatccacantctgcttggcgaagaaaacttccagaaagggatgcagctctatttcgagcgccatgatggcagtgcagcgacctgcgacgatttcgttcaggcgatggaagatgcgtcgaatgtcgatctctcccatttccgccgttggtacagccagtccggtacgccggttgtgaccgtcaaagacgactacaatccggaaaccgagcagtacaccctgaccatcagccagcgcacgccagccacgccggatcaagcagaaaaacagccgctgcatattccgtttgccatcgaattgtatgacaacgaaggcaaagtgatcccgttgcagaaaggcggtcatccggtgaattccgtgctgaacgtcacccagtcggaacagacctttgtttttgataatgtctacttccagccggtgcctgcgctgctgtgcgaattctctgcgccagtgaaactggaatataagtggagcgatcagcaactgaccttcctgatgcgtcatgcgcgtaatgatttttcccgttgggatgcggcgcaaagtttgctggcaacctacatcaagctgaacgtcgcccgtcatcagcaagggcagccgctgtctctgccggtacatgtggctgacgctttccgcgcggtgctgctcgatgagaagattgatccggcgctggcggcagaaatcctgacgctgccttctgtcaatgaaatggctgaactgttcgatatcatcgacccgattgctattgccgaagtacgcgaagcactcactcgtactctggcgactgaactggcggatgagctactggctatttacaacgcgaattaccagagcgagtaccgtgttgagcatgaagatattgcaaaacgcactctgcgtaatgcctgcctgcgcttccttgcttttggtgaaacgcatctggctgacgtgctggtgagcaagcaataccatgaagcaaacaatatgaccgatgcgctggcagcgctttctgcggcggttgctgcacagctgccttgccgtgacgcgctgatgcaggagtacgacgacaagtggcatcaggatggtctggtgatggataaatggtttatcctgcaagccaccagcccggnggcgaatgtgctggagacggtgcgcggcctgttgcagcatcgctcatttaccatgagcaacccgaaccgcattcgttcgttgattggtgcgtttgcgggcagcaacccggcagcgttccatgccgaagatgggagcggttaccagttcctggtggaaatgcttaccgacctgaacagccgtaacccgcaggtagcttcacgcctgattgaaccgctgattcgcctgaaacgttatgatgccaaacgtcaggagaaaatgcgcgcggcgctggaacagttgaaagggctggaaaatctctctggcgatctgtacgagaagatcaccaaagcactggcttaataaatccccgaatggcggcaatagcgccgccattcggggattttacccctgttttctcaggcgagtttcagattcaccacgctgcatcacccgttgcaacacttccgcttccagctccgctaatcgcaccgaccctaaccggcgcggacggggaatatccaccgtcaaatccagaccaatttttccctcttcaattaacaacacccgatcagccattgctaccgcttcgctcacatcatgcgtcaccaacagtacggtaaaaccgtgctcctgccaaagtgacacaatcaaatcctgcatctcgagtcgcgttaaggcatccagcgcaccgagcggttcatcaagcaacaataaacccggtcgatgaatcaacgctcttgccagcgccactcgctgtttctgcccgccagaaagtgcggcaggccattccccggcgcgattctccagtcctaccgcagccaacgcccgacgcgcggcatcgcgccactggcctttaaggcctaacccaacgttatcaatcaccgatttccacggtagcagacgcgcatcctgaaacatcattcgcgtgtcttcctgaatttcagccagcggtgtggtgcccgctaacacatcgccagcggttggcgtttccagacctgccagcaggcgcagcagggtacttttgccaccaccgctgcggcccaccaccgccacaaactgacctgccggaatatgtaaatccagttggttcaggacgatattttccgcgtaatgtttgcttactgcattgagcaacaatggtgtgccctggttcagacgagcagtattcataccgtggcctccttcaaatgataagccgggttccagcgcaaccagaggcgctctaacagctgngcgctgacgtcagcaagtttgccgagcagggcgtaaagaataatagcgactaccaccacgtccgtttgcaaaaactcccgcgcattcatcgccagataaccaatgcctgaattggcagaaatggtttcggcaacaatcagcgtcagccacatcaggcccaacgcaaaacgcacgccgaccataattgagggcagggcaccaggcaggatcacatggataaacagcggtatgccggataatccatagctacgcgccatctccaccaacccgcgatcgatattacggatgccatgccaggtgttgatataaatggggaatagcgtaccgagcgccaccagaaagatttttgcggattcatcaatgccaaaccacaaaatcaccagcgggatcagcgccagatgcggcacgttgcgcaacatctgaattgaggtatccagcagcctttctccccagcgcgacagtccgctaatcagtcccaaaatcaaccccagcgagccgccaattgaaaaaccaatcagcgcccgccaggagctgatcgccagatgctgccacaattcgccgctggctgagagcgtccagaacgccatcaccaccccttccggtgagggcaaaatacgcgtcgacaaccagccaaccgaggaggccagttgccacaccgtcacgatgcccaccggtaaaaaccagggggcaacgcgcaataaccacttcttcactggcgttgccattatcttcttccttagctttgcgcgactctgcgagggataaaatcattcgccaccgcttcgccttgcggattcagcggctgcggctggggaatttccggaatggcgacatccagatgtgggaacagcaactcgccgacccgatacgcttcttccagatgcggatagcccgaaagcacaaagctgtcgatgccaagcgcggcatattcgttgattcgcgcagcgaccgtaggaccatcgcccaccagcgccgtcccggcaccgccgcgcantaagccaacgcccgcccanaaattggggctgatctccagattgtcgcgcttgccgttatgtagcgctgccattcgctgttgccccacggaatccgtgcgggcgaatgcggcttgtgctttggcgatagtctcatcatcaagatgcgagattaaccgctcggcggcctgccacgcttcgtcgttagtttcacgaacaatcacatgcagacgaatgccgaaacgaattttgcgtccatgcgcggcagctttcgcccgcacttgttcgattttctctttaaccagttccggcggttcgccccaggtgaggtagagatcaacctgttctgccgccagctcctgggcgacgtctgacgatccgccaaagtaaagcggaggatacggctgttgaatcggcgggaagagcagtttggctccccgcacatgaatatgtttaccgttgaaatcgacggtttcccccagcaataaacgccgccagacctgggtaaattccgccgaggcttcgtagcgctcactatgatcaaggaacacgccgtcgcctgccagttcttgtggatcgctgcctgtgaccaggttaaacaacgcacgtccatttgagagacggtcaagcgtggcggcctggcgggcggcaacggtaggtgaggttacgctgggacgcagggcgacaagaaacttcagccgctgcgtcaccgggatcatcgatgcggcaaccagccacgcatcttcgcaggagcgccccgttgggatcagcacaccggtatagccaagacgatccgccgcttgcgcaatttgttgcagataaccgtgatcaaccgggcgtgaaccttcttccgttcccagataatgcccgtcaccatgggtcggtaaaaaccagaacatattcagactcataattgttttccttccagttgagtgggctgccagatgcgttggcgaatatcgacttttttcggcaccagacgattttcataaaacagatctgccgtttgctgctgtaaggcggcaacctcggcgttaaccggtttgatggtggtaggagggcgatgatctaagtaagaggcaatcaccggtgccggtaagcccatcgtttttgccagtanagcgatactttgctcgcgctggctgcgggttaacgcatcggcctcactaaaggttgccagtacaccctgaataaaagcgccgttttnttctgcataggggcgagctgccagataaaacgatccggtttgattgagatcggtgccgtctttcaacacccgcacgccgccctgtaataatgcagcggagtagtagggatcccagatagcccaggcgtcaacgttaccttgctggaacgcggngcgggcatcagctggcgtcagataagtgggctggatgtcagtaaacttaagtccggcctggcgtagtgcgcgcagtaaaagattgtgtgaactggaacctttctggaacgcaactttgtggcctttaagatcggctgcggttttgatcgggctgttttctgccaccagaatcacctcggcttttggcttcggcggctcgacgcccacgtacagcaaatcagccccggcagcctgggcgaagattggcggaatatccccggtactgccgagatcaatactgccaacgtttaacgcctcaagcatttgcgggccagcggggaactccacccacgagatttttgattgcggatagcgtttttccagtaactggtggctttttgccaataccataccaatactgcctttctgatagcctatacgtaacgcttcaggcgaggattctgcagcaaccacaatcgtagagacgctaagcaatcccaccagcgccagtttaatgatgttacgcatgggcattacctcgcagagaatgaagatcaggaacctgaacatcgcggcggtgcaatgcctgccagaaagtttctagcgcggtatcaagacgggtttgtaaattcggcgtgaactggggtttgtgatggtaatcaattacttgtgagtcatcggcaaacacgccgtgcaggatctcctgggctttcagcgcacttaaaactggcttaagggcataatcgaccgccagcagatgggccaccgtaccgcccgtcgccagcggtagcaccactttgccttgcaacgcacgttctggcagcaggtcgagcagggttttcagcgcaccggaataagcggctttatacacaggcgtggcgacaatcagcccgtcagcctgttgcaactgttcggtgaaggtatggagtgccggactatcgaaacgagcataaagcagatcttccgcggcgaagttttgcagattccagtgataaacctcaacatccaggccatttagtttttcccgcgcatattccagcaaggagctggagcgagaaggaaagcgaggacnacccgccagggtgatgacacgcatactctctccttataaccaattgttcttgttttgttaacattgataacaattcgctcagtctgtcggagagacaagaaaatgccaaatataaattttgtgtatctttttctgaaaataaactaaagaaagggctttatatatcacgcatatnnatttattggatagtcattagatgttgaatcaatgaattactcgttcaggtaatatttaannnnnnnnnnnnnctntaaattaaagatttgtcacttattggatttagtatgcttgatttaaatggcggacaattattgttattattaagtctaatgtcatttaaaggcattatcatatttacgaagagatcaggatgataacgatgaaaaaaagtgtattaacggcgtttataactgtggtatgtgcaacgtccagcgttatggctgctgatgataatgctatcacggatggctcagtaacatttaatggtaaagttattgctccagcttgtaccctggtagctgcgacgaaagattccgtggtgactttgccagatgttagtgccacgaagttgcaaaccaatggtcaggtttctggcgtgcaaactgatgtgccaattgaattaaaagattgtgatactaccgtaacaaaaaatgcaacgttcacctttaatggcactgcggatactactcagattacagcgtttgctaaccaggcctcatctgatgctgctacaaacgtggccctgcaaatgtatatgaatgatggtacaacggccatcaagccagacacagaaaccgggaacattttgttgcaagatggagatcagacgttgacttttaaagttgattatatcgctacggggaaagcgacttctggtaatgtgaatgcggtaacaaatttccatattaactattattaatagaactcattaattgttttattaattagtacccctccagtgttatggaggggatattcatattttttaagagtgactatttatgaaaacttgcataacaaagggaattgtgaccgtaagtttaacggcaatattactcagctgttcgtccacatgggcggcaggtaaaggcggggttgaacttgcagcaacacgtcttgtttattcggaaggtgaagagcaaatttcactgggtgtacgtaacaccagtccggatgttccttatctgattcagtcatgggtgatgaccccagataataaaaaatcagcggactttattattacaccaccgctatttgtgctgaatccggcaaacgagaatctgttacgcattatgtacattggngcnccgttggcgaaagacagagaaactcttttcttcactagcgtacgggcagtcccttcaacaacgaagcgggaagaaggcaataccctgaagattgccacacaaagcgtcatcaaacttttctggcgaccaaaaggtttagcgtatcccttaggcgaggctccggcgaaactgcgttgcacttcgtcagctgacatggttacggtcagtaacccaacaccttatttcattaccctgacagacctgaaaataggtggaaagttagttaaaaatcaaatgatttccccctttgataaataccaattctctctgccaaagggtgccaaaaatagcagcgtaacgtatcgaaccatcaatgactacggggcggaaacgccgcaactcaactgtaaatcgtaattcgtcttcagttaagagagcgagatgtatagaactcaccgacaacacagcctgttaagctctggtggagtgccatcgtttattggtgggctggtggtgtttgtgccggcagcgttcaatgcacaagctgaaacctggttcgatccagcctttttcaaagatgatccctcaatggtggccgatttgtctcgtttcgaaaaaggacaaaaaataacgccaggggtttatcgtgtcgatattgttctgaatcagacaattgtagatacgcgcaacgtcaattttgttgagataacgccagagaaggggattgccgcctgtttgacgactgaaagcctggatgcaatgggcgtgaatactgatgcatttccggcttttaaacaactggacaaacaagcgtgtgcgccattggcggagattattccggatgccagcgtaacttttaatgtgaataaactccgtctggaaatttcagtaccgcaaattgccatcaaaagtaatgctcgtggttatgtccccctgaacgttgggatgaagggatcaacgcgctattactgggatattcatttagcggggctaacagtattcatagcagcgcagacagtgattctggcgacagttattttctgaatttaaacagtggcgttaatttaggcccatggagattgcgcaacaattcaacatggagtcgtagtagtggccaaaccgcagaatggaagaatctcagcagctatttgcaacgggcggttattcctctgaaaggcgaactgaccgtaggtgatgattatactgcaggcgattttttcgatagtgtcagctttcgtggtgtgcagctggcgtcagatgacaacatgctgccagacagcctgaaagggtttgcgcctgtggtgcgtggtatcgccaaaagcaatgcccagataacgattaagcaaaatggttacaccatttaccaaacttatgtatcgcctggtgcttttgaaattagtgatatctattccacgtcgtcgagcggtgatttgttagttgaaatcaaagaagcggacggcagcgtcaatagctacagcgtacccttttccagcgtgccattactccagcgtcaggggcgaatcaaatacgcggtgacactggcgaaatacagaaccaatagtaatgaacagcaggagagcaaatttgcccaggccacgttgcagtggggcggaccgtggggaacgacctggtatggtggtggacaatatgctgaatattaccgtgccgccatgtttggtctgggatttaacctcggcgatttcggagcaatttcgttcgatgtgacccaggcgaagagtacgctggcagaccaaagcgaacataaaggtcagtcatatcgttttctgtatgccaaaacgctcaaccaattgggtactaactttcaattgatgggctatcgctattcgacgtcgggtttctacaccctttccgacaccatgtataaacatatggatggctacgaatttaatgacggtgatgatgaagatacgccgatgtggtcgcgttattacaatttgttttacaccaaacgtggcaaactgcaggtcaatatctcccagcaattaagcgagtacggttcgttttatttaagtggtagccagcaaacttactggcataccgatcaacaggatcggctattacagtttggctataacacgcaaattaaagatctctcgctggggatctcctggaactacagtaagtcccgtggccaacctgatgctgatcaggtgtttgcacttaatttttccctgccactcaatctgttgctctccagaagtaatgatagctataccagcaaaaaaaattacgcctggatgacctctaacaccagtatcgataacgaagggcacactacacaaaacctgggtttaacggagacactactcgatgacggtaacctgagctacagcgtgcaacagggatataacagcgaggggaaaacggctaatggcagcgccagcatggactacaaaggggcgtttgcagatgcccgagtgggctacaactacagcgataacggcagtcaacaacaactgaactacgctctttcaggcagtttagttgcccattcacagggcattaccctggggcaatcactgggggaaactaacgttctgattgcagcaccaggcgcagagaatactcgtgtggcgaacagcaccgggctgaaaactgactggcgcggatataccgttgttccttatgccacttcttatcgtgaaaatcgaatcgcacttgatgcggcgtcgttaaaacgtaacgtggatcttgaaaatgcagtagtcaacgtggttcccaccaaaggggcgttggttctggcggagttcaatgcccatgcgggagcaagggtattaatgaaaacatcaaagcagggtatatcgctgcgttttggcgcgatagcgacgctggacggcgtacagactaatagcggcataattgatgatgatggctcgctctatatggcgggtttaccggcgaagggaacaataaccgtgcgctggggcgaagctcccgatcaaatttgtcatatcagttacgagcttaccgaacaacaaattaactctgcgattacgcgaatggatgccatatgcagataatctttggagaaaaatgcgtgtcattactacgactattttttgccgccgtcttaatgctatggtgcgctcaaaccgctgcttatagcgggcagtgtcataccactcaggggaatccgtatattggcgtcaattttggcgttaaaaccctggaggaagaagaaaatacgactggggtagtaaaagacaaattttatcagtggaacgaatcgaatgattattatgtttcctgtgattgcgataaagacaatgtcagaagtggccgatgggcattcgccgcggattcaccgttagtctatttaggcgacaactggtacaaaattaatgactatcttgccgccaaagttttattgcaggttaaaggcagttctcctacagcggttcctttcgaaaacgtggggactggggcagatacccggtggcatatttgtgaccccggcggtcaacgtttaggcggccagggagctagcggtaatagcggtagcttttccctgaaaatattgcagccgttcgttggttcggtcgtcattcctcctatggcgctggcgcgattatttgaatgctacaacatacccgcaggtgattcctgcacgactacaggcacaccggttttagtgtattacctgtctggtactatcaattcacttggctcatgttccgtcaatgccggagaaacaatcgaggtcgatctgggcgacgtatttgcggctaactttcgtgttgtagggcataagcctcttggggccagaacggcagaacttgcaattccagtcaggtgtaacacgggaaacgcggggttagttaacgtcaacctgagtctgacggcaaccacagaccccagctatccccaggcgattaagacgtcacgtcctggcgtgggcgtggtggtgaccgatagccagaacaacattatttcccctgctggtggaacattaccgctctctattcctgatgatgcagacagtatcgcgcgaatgaatgtctatccagtcagcacgacaggtgtaccaccagaaatcgggcgatttgaagccacggcaacggtgagaataaattttgattaacgcgtgaacgtatgaagaaaaaaaacgatatttcagtgcgttatcttgttctttagcattcttaacatccatgtcgggatggctgggcctgaacaagttagtatgcatatttatgggaatgtggtcgatcagggctgtgatgtcgccaccaaaagtgcattacaaaatattcanattggtgattttaatatcagtgattttcaggccgcgaataccgtaagcactgctgctgatttgaatatcgatatcaccggttgtgccgctggtattactggcgcggacgtcctttttagcggcgaggctgacacccttgcgccgacactgctcaaactaactgacacaggcggaagcggtggtatggcaacggggattgccgtgcaaattcttgatgcgcaaagtcagcaagaaatcccgctcaatcaggtccagcctcttacgcctttaaaagccggggataacacactcaaatatcaacttcgttataagtccacaaaggcgggagcaacgggcggtaatgcgacggcggttctctattttgatctggtttaccagtgaaggagtgatgttgaaacggataatctggattctgttcttactgggattaacgggggggggtgagctatttgcccatgatggcacggtcaacattagcggatcgtttcgccgtaatacatgcgtgctggcacaggatagcaagcaaatcaatgtgcagttaggcgatgtctcactgacacgtttttctcatgggaattatggcccggagaaatctttcatcattaatttgcaggattgcggaacagatgtcagcacggttgacgtcaccttttcaggaacccccgacggagtgcagagcgaaatgttgtccattgaaagtggtacggatgcagccagcgggctggcaattgcgattctggatgatgcgaagatattgattccgcttaaccaggcgagtaaagactacagcctacatagcggtaaggtgccattaactttttatgcgcaattgcgacctgtcaatagcgatgtgcagtcgggtnaagtgaatgccagcgcgacatttgtacttcattatgactaatacgtggaacagattggcgctcttgattttcgccgttttatcgctgctggtggcgggtgaattgcaggcaggagtggtggtcggcggaacgcgatttatctttccggcagacagagaatcgatatctattttactgactaataccagtcaggaatcctggcttattaacagtaaaatcaaccgcccaacgcgttgggccgggggtgaagcgtcgacagtgccagcaccattactggccgctccgccacttattctcctgaagcccggtacgacaggcacgttgcgcttgctgagaacggaaagcgacatcttgcctgtggatcgcgaaacgctatttgagttaagcattgccagcgtgccatccggcaaagttgaaaatcagagcgtaaaagtggcgatgcgctcggtatttaaactgttctggcgacccgaaggttgccgggcgacccgctggaagcttatcaacaattacgctggacacggaagtcgcagggtgtacaactcactaacccaacgccttattacattaacctgattcaggtgagcgtaaatggtaaagcgttaagtaatgtgggagttgtgccgcctaaaagccagcgtcagacaagctggtgtcaggcaatagcaccgtgtcatgttgcctggcgggcgataaatgattacggcgggttgagtgcaaagaaggagcaaaatctgccctgaaacaggttcggaaaacgtttgcgttttttttgccgcaggtcaattcccttttggtccgaactcgcacataatacgcccccggtttgcacaccgggaatccaggagagttcatgtactaccccttcgttcgtaaagcccttttccagctcgatccagagngcgctcatgagtttacttttcagcaattacgccgcattaccggaacaccgtttgaagcactggtgcggcagaaagtgcctgcaaaacctgttaactgcatgggcctgacgtttaaaaatccgcttggtctggcagccggtcttgacaaagacggggagtgcattgatgcgttaggcgcgatggaatttggatcgatagagatcggtaccgtcacgccacgtccacagccaggtaatgacaagccgcgtctctttcgtctggtagatgccgaaggtttgatcaaccgtatgggctttaataatcttggcgttgataacctcgtagagaacgtaaaaaaagcccattatgacggcgtcctgggtattaacatcggcaaaaataaagatacgccagtagagcagggcaaagatgactatctgatttgtatggaaaaaatctatgcctatgcgggatatatcgccatcaatatttcatcgccaaataccccaggattacgcacactgcaatatggtgaagcgctggatgatctcttaactgcgattaaaaataaacaaaatgatttgcaagcgatgcaccataaatatgtgccgatcgcagtgaagatcgcgccggatctttctgaagaagaattgatccaggttgccgatagtttagttcgccataatattgatggcgttattgcaaccaataccacactcgatcgttctctggttcagggaatgaaaaattgcgatcaaaccggtggcttaagtggtcgtccgcttcagttaaaaagcaccgaaattattcgccgcttgtcactggaattaaacggtcgcttaccgatcatcggtgttggcggcatcgactcggttatcgctgcgcgtgaaaagattgctgcgggtgcctcactggtgcaaatttattctggttttatttttaaaggtccgccgctgattaaagaaatcgttacccatatctaattatttcttcgaattcctctttataagataatcagggctttattttcagccctggttgttttatattcattgctgttgcttatttagacattttgtacttttattgttgaggttattaagcgaagcgacaatggattgtgttgctgcggttttatagggtaggggagaggcagatgcgaattaaaccagacgataactggcgttggtattacgatgaagagcacgatcgtatgatgctcgatttagccaatggtatgctatttcgctcacgttttgcgcgcaaaatgttgactccagatgccttttctcccgcaggcttttgcgttgacgacgccgcgctctatttctcttttgaagaaaagtgccgcgattttaatttatctaaagaacaaaaagccgaactggtgctgaatgcactggtagcaattcgctatctcaaaccgcaaatgccgaaaagctggcattttgtttcccatggtgaaatgtgggtgcccatgccgggcgatgcggcctgcgtttggttgagcgacactaacgagcaagtgaatttactggtcgttgaatctggcgagaatgccgcgctatgcctgctggcacaaccctgcgttgttattgcgggtcgcgcgatgcagttgggcgacgccattaaaatcatgaacgacaggctgaaaccgcaggttaatgttgacagcttcagcctcgaacaggcagtctaacgcgccaacttaagtgcagtcttcggtacacagctacagcaaagaatggtgccatcatcgcccattgctgattttttcagcggcgtgacttcgccttctaaaagctgaacacggcaacttccacaaatgcccnnnnggcaagaataagggatacgaattccctgattttctaattgctccagcaacacctgttggttatttccacgaaatgcctgtccctgccagtcaatatctacattggcgttcggttgttgcgtgatgttggcagtatcatcagcggcagctgcgccgtaaatttttgccggagccgttgtcagaatttccacctcatcgccaacgcgaatcacgccgctattacgggcaattaaattctgaccaaaatcgacatcgccgttatcctgggcagtgcggaaagattgcaatgtttttaatggttcgcctgccggatgtttttgccctttttctgggctgacggtggtgaaaatacagcggctacaaggtttaaccacatcaaacaccacatcaccaatgcgaatcactttccaactatcttcttcccaggctgacgcgccggaaaccaccagattggggcggaattgctccatttttacactggccggacaacgttgttggagatcacgtaacgaggcttcgttagcaagaaggtaaggatagccatcagcaaatgacaggggtacagtgttgtggcgtttcacgcgccgggtcatttgtggccccacccagcgtaattgcacttcgcgggagaaaaatccacttaaccatttgttgatcgcttctggcgcaattcgcgcggtaaaatgtgtgccccaaacttcggttggtgcgtcttgtgtggcgaaatcagcaaaacgaacatatgcgctactgctatctggtgcggtgagatgcaagccatcatgcacgggtgaaggagtaaatcgtaccatctggggaaactggcgagcggtgataaacgtaccgtcaggttccgtgatcataaagatgcgatcgaaggccagaccactgacatctgccagagcatgtgtaagaccaatgccgcgcatcgatttaacaggatgaataaaaagccgggttaatgtcgccacggtgcggtcctcaaatgaaaataagccctcaactttatgacatgacgcgcttattagctataatgcgcaacaattttcttagcgcctgtcccattaggctattttatttgtcagtttggtcctgggttgtgctcgaaatcctcacgtacttgtgtacgctccggtttctccgcgctgtccatgtccagactgactgcaacaattacgcctactgcggtaggctcttagagtaaaagtgacgatatgaattctctgtttgccagtacggcccgtgggctggaagagctgttaaaaactgaactggaaaacctgggggccgttgaatgccaggtggttcagggtggggtccatttcaagggcgacacacggcttgtttaccagagcctgatgtggagccgcctggcctcgcgtattatgttgccgctgggcgagtgtaaggtttacagcgatttagacctctatctcggtgttcaggcgatcaactggacagagatgtttaatcctggcgcgaccttcgctgtccacttcagtggtttgaatgacactatccgcaacagtcagtacggcgcgatgaaagtgaaagacgcgatcgtcgatgctttcacgcggaaaaatctgccgcgtccaaatgttgatcgcgatgcgccggatatccgcgttaacgtctggctgcataaagaaaccgccagtatcgcccttgatctcagtggtgatggtttacatctgcgtggctatcgcgatcgtgctggtattgcgccgatcaaagaaaccctggcagccgctattgtgatgcgatccggctggcagccaggaacaccgttgctcgatccgatgtgtggttccggtacgttgctgattgaagcggcgatgctggcgaccgatcgcgcaccaggcttgcaccgtgggcgttggggctttagcggctgggcgcagcatgatgaagctatctggcaggaagtgaaagcggaagcgcaaactcgcgcccgtaaaggcctggctgagtatagctctcatttttacggttcggacagcgacgcacgggtgattcaacgtgcacgcactaacgcccgtcttgcggggattggtgaactgatcacctttgaggtgaaagatgtcgcgcaactgaccaatccgctgccgaaagagccgtacggcacagtgttaagcaacccgccatacggggaacgtctggacagcgaaccggcgctgattgcgctgcatagcctgctgggtcggatcatgaaaaaccagtttggtggctggaatctctctttgtttagtgcctcgccggatctgctaagctgcttgcagctgcgtgcagacaaacagtacaaggcgaaaaacggcccgctggactgcgtacagaaaaattaccacgttgccgaaagcactccagacagcaaaccggcgatggtagcggaagactacgccaaccgcctgcgtaagaacctcaaaaaattcgagaagtgggctcgtcaggaagggattgaatgttaccgcctgtatgacgccgatctgccggaatataacgttgccgttgaccgttatgccgactgggtggtggtgcaggagtatgcgccnccaaaaactattgatgcgcacaaagcgcgtcagcgtctgttcgatattatcgctgcaaccatttcggtactggggattgcgccaaacaaactggtgctgaaaacccgtgaacgtcagaagggcaaaaatcagtaccagaaactgggcgagaagggcgagtttctggaagttaccgaatataacgctcacttgtgggtgaacctgacggattatctcgatactggtctgttcctcgatcaccgtatcgcccgtcgtatgctcggccagatgagcaaaggcaaagatttcctcaacctgttctcttataccggcagcgccaccgtgcatgcgggattaggcggtgcacgcagcaccaccaccgtggatatgtcgcgtacttatctggagtgggcagaacgcaacctgcgtctgaatggcctaaccgggcgtgcgcatcgcctgattcaggccgattgcctggcgtggctgcgtgaggcaaatgaacagttcgatctgatctttatcgatccgccaaccttctctaactcaaaacgaatggaagatgcgtttgatgttcagcgcgatcatctggcgctgatgaaagatttgaaacgtctgctgcgtgcaggtgggacgatcatgttctcgaacaacaaacgtggcttccgtatggatctcgacggcctggcaaaactgggactgaaagcacaagaaattacgcaaaaaacgctctcccaggatttcgcccgtaaccgccagatccacaactgctggctgattaccgcagcctgaaaggaatagtaatgtcattaatcagtatgcatggcgcatggctgtcgttcagcgacgcgccgcttctcgataacgcagaactgcatatcgaagataacgaacgtgtttgtctggtgggccgcaacggcgcaggcaaatcgacgttaatgaaaatcctcaaccgtgaacaagggctggatgacggtcgcattatttacgagcaggatttgattgtagcgcgtctgcaacaggatccgccgcgtaacgttgagggtagtgtttatgatttcgttgccgaaggcattgaagaacaagcggaatacctgaaacgctatcacgatatttcgcgcctggtgatgaacgacccgagcgagaaaaatctcaacgaactggcgaaggttcaggaacagctggatcaccacaacctgtggcagctggaaaaccgcatcaacgaagtgctggcgcaactggggttagatcctaacgttgcgctgtcgtcgctttccggcggctggttgcgtanagcggcattaggacgcgcgctggtgagcaatccgcgcgtattgctgctggacgaaccgactaaccacctggatatcgaaaccatcgactggctggaagggttcctcaaaaccttcaatgggacgattattttcatctcccacgaccgttcgtttatccgcaatatggcgacgcgcattgttgatctcgatcgcggcaagctggtgacctatccgggcaattacgatcagtacctgctggaaaaagaagaagccctgcgcgtggaagaactacaaaatgccgagttcgatcgcaaactggcgcaggaagaagtgtggattcgccaggggatcaaagcacgccgtacccgtaatgaaggccgcgtacgcgccctgaaagcgatgcgtcgcgagcgtggcgaacgtcgcgaagtgatgggtaccgcaaagatgcaggtggaagaggccagccgctccggtaagatcgttttcgaaatggaagacgtttgctaccaggttgacggaaagcaactggtgaaagatttttctgcccaggttctacgtggcgacaaaattgccctgattgggccgaatggctgcggcaaaaccacgctgctgaaactgatgctcggtcancttcaagcggacagcgggcgtattcacgttggcaccaaactggaagtggcttatttcgatcancaccgcgcggaactggatcccgataaaacggtgatggataaccttgccgaaggtaagcaagaggtgatggttaacggcaagccacgccacgttttgggctatttgcaggacttcctgttccatccgaaacgggcgatgacgccagtacgtgcgctttctggcggtgagcggaaccgcttgctgctggcgcgtttgttcctcaaaccaagcaacttattgattcttgacgaaccgaccaacgatcttgatgtcgaaacgctggaactgctggaagaactgatcgacagctaccagggcacggtattgctggtaagccacgatcgtcagtttgtcgataacaccgttacagaatgctggatcttcgaaggcggcggtaaaattggtcgttatgtcggcggttatcatgatgcccgtggtcagcaagagcagtatgtggcgctcaaacagcctgcggtgaaaaaaaacgaagaacccgccgcgccaaaagcagaaactgtaaaacgcagcagtagcaaactaagctataaattgcagcgcgaactggagcagctaccgcaattgctcgaagatctggaggcgaagctggaagccctacagacgcaggtggcggatgcttccttcttcagtcagccgcatgagcagacacaaaaagtgctcgccgatatggctgctgcagagcaggagctggagcaagcctttgaacgctgggagtatcttgaagcgttaaaaaatggtggctgatcgcaaaatagtcgatttaaacagagacagctgacaacggtaaaattgcctgatgaactgggtttatcaggcatgaaaacaaacactttgttagtcatctgtaaaatagcgcatcattaaggagtaccaatgtgcgaacatcatcatgccgcgaagcacatcctatgctcgcagtgtgacatgctggtggcgttaccgcgccttgagcatggtcagaaagcggcatgtccccggtgtggcacaacgttaaccgtggcgtgggatgccccccggcagcgtccgaccgcctatgcgttggctgcactgttcatgctgttgctgtccaacttgtttccttttgtgaatatgaacgttgcaggagttaccagtgaaattacattactggaaattcccggcgtgcttttttctgaggactacgccagcctcggcacctttttcctgttgtttgtgcaactggttcccgcgttttgtctgataaccattctgttactggtgaatcgcgcggaattaccggtccgtttaaaagagcaactggcacgggtgctttttcaactcaaaacctggggaatggcggagattttcctcgcgggtgtgctggtcagtttcgttaaactgatggcttacggcagcattggcgtaggcagcagctttctcccctggtgtttattttgtgtcctgcaactgcgcgcttttcagtgcgttgatcgtcgctggttatgggacgatatcgccccgatgccagaactgcgccagccgctaaaaccaggcgtcacggggatacgtcaggggctgcgttcgtgctcctgttgtacggcaatccttcctgctgatgaacccgtgtgcccgcgctgtggtactaaagggtacgttcgacgtagaaacagcctgcaatggacactcgcgctgcttgttacgtccatcatgctgtatcttccggctaatattttgcccatcatggtgacggatttattaggctcgaagatgccatcgacgattctcgctggggtcatcctgttatggagcgaaggctcttatcccgtcgctgcggtgatctttctggccagtattatggtgccaacgttaaagatgatcgccatcgcgtggctgtgttgggatgccaaagggcatggcaagcgcgacagtgaaagaatgcatttgatttatgaagttgttgagtttgtaggccgctggtcgatgattgacgttttcgttatcgcggtgctctcggcgctggtgcgtatgggaggtttaatgagtatttatccggcaatgggtgcattaatgtttgctttagtcgtcataatgacaatgttttctgctatgacgtttgacccgcgtttgtcgtgggatcgtcaacctgaatcagagcatgaggagtcctgacagtatggaatctaataatggggaagccaaaatccagaaagtgaagaactggtctcccgtgtggatatttcctatcgtcacggcgctcattggggcctgggttcttttttatcattacagccatcagggaccggaagtgaccctgatcaccgcgaatgcggaaggaattgaaggtggcaaaaccaccattaaaagccgtagcgttgacgtcggcgtggttgaaagcgccacactggctgatgatttgacacacgttgaaatcaaagcgcggctgaattccggtatggaaaaattgctgcataaagataccgtcttttgggtggtgaaaccgcagattggtcgagaagggattagcggtctgggaaccctgctgtctggggtttatatcgaactgcagccaggcgcgaaaggcagcaaaatggataaatacgatttgctggactcgccaccgttggccccgcctgatgcgaaaggtatccgtgtgattctcgatagcaaaaaagccgggcagctctcgccaggagatccggtgctgttccgtggctatcgggtaggttcggttgaaaccagcaccttcgatacgcaaaaacgcaatatcagttatcaactgttcatcaatgcaccttatgaccgactggtgaccagcaatgttcgcttctggaaagatagtggcattgcggttgatctgacgtcagcgggaatgcgtgtggagatgggctcattgacaacgctgctgagtggcggtgtcagctttgatgtgccggaaggtctggatttagggcagccagtggcaccgaaaacagctttcgttttgtatgatgatcagaagagcattcaggattcgttgtacaccgatcacattgattatctgatgttctttaaagattcggtacgcggtctgcaaccgggagctccggtagaattccggggtattcgcctcggtaccgtaagcaaagtgccattctttgcgccgaatatgcgtcagacatttaacgatgattaccgtattccggtgctgattcgtatcgagccagagcggctgaaaatgcagcttggcgaaaatgcggatgttgttgagcaccttggcgaattgttgaaacgtggtttacgcggatcgctgaaaaccggaaacctggtcactggcgcactgtatgttgatctcgatttctatccaaatacgcctgcaataaccggtattcgtgaatttaatggttatcagattatcccgaccgttagcggcggcctggcgcaaatccagcaacgactgatggaagcgttggataagatcaacaaactgccattgaatccgatgattgaacaggcaaccagtacgctttctgaaagtcagcgcacaatgaaaaacctgcaaacgacgctggatagcatgaacaagatcctcgccagccagtcgatgcagcagttgccgacggatatgcagtcaacgttgcgtgaattgaatcgcagcatgcagggcttccagcccggctccgcagcctacaacaagatggtggcggatatgcagcgccttgatcaggtgttgcgagaactgcaaccggtgctgaaaacgctcaatgagaagagtaacgcgctggtatttgaagcgaaggacaaaaaagatccagagccgaagagggcgaaacaatgaaaaagtggctagtgacgattgcagcactgtggctggccggatgcagctccggcgaaattaataaaaactattaccagttacctgtggtgcagagcggtacacaaagtaccgccagccagggcaatcgcctgttatgggtagagcaggtcgctgtacctgactatctggcggggaatggtgtggtttatcaaaccagtgatgtgaagtatgtgattgccaacaacaacttgtgggccagcccgttggatcaacagttgcgcaacaccctggtagccaacctgagcacgcaactgcccggctgggtggttgcctcccagcctctgggaagcgcccaggacacgctcaatgttaccgtaacggagtttaacggtcgctatgatggcaaggtcattgtcagtggtgagtggctgttgaaccaccagggacaactgatcaaacgtccgttccgtctggaaggagtgcaaactcaggatggttacgatgagatggttaaagtgctggccggtgtctggagtcaggaagccgcttctattgcacaagagataaagcgtctaccttaattataaagatttgtaaatataaccgtctccggtatgttgcctgaggcggtttttttgtttctaacgtgcggaaaaatttgttcctcttcacattttttgtacaaccgacatgcccgtgtagctcacaaatatgacagtggcgtgaattttgcgcattgacggcagttatgattcgcggtattgcttaactgtgattgcacatttagtaatcactgttttcttttccaccagaaaccagtatgagggaaacgaggcatgaagagacaaaaacgagatcgcctggaacgggcacatcaacgtggttatcaggccggcatcgccggacgctcaaaagaaatgtgtccctatcagacgctgaatcaaaggtcacaatggctgggaggctggcgagaagccatggcggacagggtagtaatggcctgattctgtctctttaaaaagaaacctnnnnntngcggaggtttcgccttttgatactctgtctgattataatcagaaggcagacgtatcctggaacagaccgactttcaggtcgctggcggtatagatcagacgaccatcaaccagcacttcgccatccgccaggcccataatcagacgacggttaacaatgcgtttaaagtgaatacggtaggtcacttttttcgctgtcggcagtacctgaccagtgaatttcacttcgccaacgcccagcgcgcggcctttaccttcgccgcccagccagccgaggtagaaccctaccagctgccacattgcgtccaggcccaggcatcccggcataaccggatcgccaataaagtggcatccgaagaaccacagatccggattgatatccagttctgcttcaacataccctttgtcgaagttaccacccgtttcggtcattttgaccacacggtccatcatcagcatgttcggtgctggcaattgcgggcctttagcgccaaacagttcaccgcgaccagaggcaagaaggtcttcttttgtataggattcgcgtttatctaccatgttctctgtaagccttattttattgaagcacgcaggatagctaacacgtgtacgctgaacaagtccgatcagttcggaataaaccagttcagccaacgtaatggccatggaaaacggtgacgtccttcctgttgcgatgcttgcgcgatacgttcctggatggtttgcatcagcgtcgtttggccttcgccatcccacaccagatttaataataacggcagtgcgtcagtcacatcgtctactgcccagatggtgaatttgccttcttctaccgctttcaccagttcactgtgaagacttaaatggcgaacgttagctgtggggataatgacaccttgtttcccggttaactcacgttgctggcaaatagcaaagaagccttcgattttctcatttaaaccaccgaccggctgggcgcgaccgaactgatcgactgaacctgtgatagcgatactctgattcaccggcacatcggcgagggcgcttatcagggcgcagagttcagccatcgaggcactatctccatcaacttcactgtatgactgctcaaatgtcagcgatgctgagaaggggatctgttgctcaagctgtagttccgacatcaggaacgcttgcatgatcatcatccctttcgcatggatattgccgccaagctccgctttgcgttcgatgtcggtgaattcaccatcgccaatatgcacaacgcagctaatgcgagaaggttcgccaaaagcgcgtggatgacccggaaattcaatgaccgaaagggcgttaatttgcccgatgcgttcgccttcggtttcaatcaggatttgctcctgaaggatctcatcctgcatacgttcagcgaggaaaccttcgcgccattcacgctgctgcagcattaagtttagctgctcgccggagaaggtgtcgccatcacacagggaggcgacctctttacactggcggaggatccactgcgggctaagcggaagtgtttcttgttcaccggtgtagcgtgctgcttcgcggataagtaccggccaggcatccgctcccggggcaggtaagtgattatgtctggcggtaaatgtcacccagcgacaccactgggttactgactccgcatcgacaatctgcagagtatcttcaaattcgctataaatagcctgctctgaaagctctggctccatctcctggaaatcagccaatgattcgcgttcgcctaccagaatgactttcagcttcaatggcatcgaaggcacagagacggggagagggcgcgactcatcaaacgcaacccagtcaaaacgctcgcggttaacgatatttttcagccgcatccacagcagaggttgcgccagcagtgtacgcaaagagatgatgagaataccgccatttgcctgatgcaccagaccaggctgcagggtaatgtcgccattaaactggcgcaggcagccaaagagttgctccgcttctacccagtcggcagcgacaacttgcgttaaagtcgcaaaattatcatctgcactcactgcgtgacgtaagcggatggagtggccggaaacctcatagtgaccgcccaccagttggcctgcatcgctttgtagcgtacgcgcggcattggcaataagattcagatactcagactcttccggggccttcgccagcataaaagaggaggatgctcgcgtatgcagcaactgctccagcgcaaattgcagccgcggttgagtatcactgaataaaggatcgttttcgtcaatcaaatgtggctgagcaaatatttcctgatagctatcggtatcaggaaccaggtcacgccatgcaagtttcgtaatggtcaaagttgatgttttttagtctgttgtcaaagccgcgattataccgtaaccggcactacagcacacgtagaaagcaccgacaatactcctggcatgggcgttaaagctcacaggatggagattcttttcttcactggcctaaaaagctgatattctgtaaagagttacacggtaacattgagatcgctatgaaatatcaacaacttgaaaatcttgaaagcggttggaaatggaagtatctggtgaagaagcatcgcgaaggggagttaatcacccgttacatagaagccagtgccgcccaggaagccgtcgatgtgttgctctcgctggaaaatgaacccgtgctggtaaatggctggattgacaagcatatgaatccggaactggtcaatcgcatgaagcaaaccattcgggcaagacgaaagcgccattttaatgcggaacaccagcatacgcgcaaaaaatcgatcgatctggaatttattgtctggcaacgtctggctggtcttgcgcagcgtcgcggtaaaacgctttctgaaacgattgttcagctgattgaagatgcggaaaacaaagagaaatacgcgaataaaatgtcttctctgaagcaggatctgcaggcattgctgggtaaggaataactgacgaaagtcagttcaatttactaaaggcaaaaaaaaccccgcagcagcggggtttttctaccagacgagaacttaagcttgcggctgagttacaacgtctttgatacctttaacttcgatctctacgcgacgatccggagccaggcagtcgatcagtgcagcacgctgtttcacgttgtcacaggtgttgccagtaaccgggttggattcgcccataccacgtgcggagatcttgtctgccgggatacctttggagatcaggtaatcaacaacagactgagcacggcgctcggacagaccctggttgtaagcgtcagaaccgatgcggtcggtgtaacccagaacaactacggaaccgtctttcggatccaggttgctcagctggctgtacagctgatccagagcagcctgaccttccggtttcagggttgctttgttgaagttgaacagaacgtcagacttcagagtgaagtgcttggtctgtacttccggtgccggagctggagccggagcaactactggagctgcttcgccctgaccgaaacggtaggaaacacccaggctcagcatgccgttgtccggacgagtgccgatggtgtgtgcgtcaccgatgttgttggtccactggtattccagacgggtagcgatttcaggagtgatcgcgtactcaacaccgccagcgaagaccggagaaacgccggtgtcgtggtttttaccataaacgttggatttagtgtctgcacgccataccataccacccagacgagtgtagatgtccaggtcgtcagtgattgggtaacccagtttagcggtcagttgaacgccctgagctttgtatgcaccgttttcaacgctgcctttgtacggcatacgacctaaccagtcgtaacccatttcaaagccaacatacgggttaacctggtaaccaccaaaagcaccagcgcccagttggttttcatgggtcgggccattgttgttgatgaaaccagtgtcatggtactgggaccagcccagtttagcaccagtgtaccaggtgttatctttcggagcggcctgcgctacggtagcgaaaccagccagtgccactgcaatcgcgatagctgtctttttcattttttgcgcctcgttatcatccaaaatacgccatgaatatctccaacgagataacacggttaaatccttcaccgggggatctgctcaatattaactctaccgatatcttcggcttatgccgagcacccctggcgatgtaaagtctacaacgtagttgaaaacttacaagtgtgaactccgtcaggcatatgaaaaaaaagtcttgtataaggtatgtttaatcttttttgtcagcgacaatttacagaagagaatcgcggaaaccgcttcagacaagcctncgcaaggaaaattagtcacgactgaaagcattggctgggcgacaaaaaaagttccaggattaatcctaaatttacttaatgatacaaattagagtgaatttttagcccggaaagttgtctcntggcgtgagaggatgcgcttaccggacgcataataaaccccatagcgttaccttcatttgccgcatcaacaagttcagcatgctcttcttcagtcaaatcatctgccaaccaaccgatcaccacactgtaattgcccgtgcgtaaagcgcgaaccattgactccacagtgtggcaaggggagagctggctaatctgcattactttcgttaagggtagcccagatgcctgaacccattcccgactcagtttttgttgcggtgttaaccagagttgccagcgcgattgctgaccgagttgctgtaacaatggcaacagtagaagttgcgtcatcatgggctgatcttcgcgatagacaacttcactgataagcccggctgtagtgttttccgtagagacacgcgcaattttacttgctgcggatgagaacgacgaagaacgatgtgcatagcctgaagtgtacataatcaatccagcccctgtgagttactgtatggatgtacagtacatccagtgacaacaaagatcaaccctattttcggaaagagcctcgcaaattttgtcgttggtgacgggaaaacataaattaatcttgccccttaagaataagttgcctattttcgtagttaacggatccgttaatgtgaatcattcttttatgttatgattttaaaaggaattttatgaaaagcctctcctataagcggatctataaatcacaagaatacctggcaacgttgggcacaattgaataccgatcattgtttggcagttacagcctgaccgttgacgacacggtgtttgcgatggtttctgatggtgagttgtatcttcgggcttgtgagcaaagtgcacagtactgtgtaaaacatccgcctgtctggctgacatataaaaagtgtggccgatccgttaccctcaattactatcgggttgatgaaagtctatggcgaaatcaactgaagctggtgcgtctgtcgaaatattctctcgatgcagcgctgaaagagaaaagcacgcgcaatacccgggaaagactgaaagatttgcccaatatgtcttttcatctggaagcgattctcggggaggtggggattaaggatgtacgggcgttacgtatacttggggcaaaaatgtgttggttgcgactgcggcagcaaaacagtctggtgacagaaaagattctgtttatgcttgaaggtgccattatcggcattcatgaagctgcgctcccggtggcacgccgccaggagcttgcagaatgggctgactctcttacgccgaaacaggagtttcctgcggaacttgagtaatctggcgttgcagacgaccaatctcaggcagtaatgcaatcaataatccaacttgttgtacgaccagaggttctttgctgtctgcccgtggttcaagttgctgcatccgctgtttcaggctagctaatgcctcattgacgcgttcttcatcagcaggttgatgatgtaacgcgtcatcaacatagcaaactgcgtcatcaagaaacgccagaatttcaggattagttaactgctcccggtgagcaccgagggctgagatatagctggtaaacgtatggttaaggcacagcaaccgaaacgcggcttcgcgaatttgcggggtaacgttcggctcgctggacatatttgataccaccgacgccagctcagcatcacggttgtgtgcatcgcggcgggcaatacgatacgccagacggttatcacgcccctgatggtattgctccagtatggcatcgagataccgacagttggcctctgtggcgcgttcgagcatgcgcggcagattgcgaaactgccagtcaggccagatgtagctcactgccgcccacgcaatggcacaaccaatcagcgtatcgattacgcgaggtaacgctacttcaaaaccttcacccagtaagttaaaacacagtagcaccaaaagtgtgatgaacatcgttgcatgagcgtattgcacgttacggaaggcaaaaaagagcacgccggtaataaccagcagcaccagctgcccttccagtgatggcacanaccacagcacaggaatgccaatggcgatacctaccagcgtaccaataatccttaacttcaggcggtggcgcgtggcgttatagtttggctggcagacaaacaaacttgtcagcaagatccaatacccgtgatgcattccggttatctgaatgatggcgtagccgaagcacaacaccagcgacattcttaccgcatgacggaagagggcggattccggcgtgaagtgacggctaagacgcagccagatatcactcaacccgtgcgggctgtcatcagcgagctcattttngtcattattatggggtagtgcctgggcctgttctgattcaattgttgccagttgggcatcaatggcgcgtaaattgttcagcaaaaatcccagtgttttgagtaaatcggcgggtgcgccgttatcgcgcatccgctccagcgcagcatcaatatgcgtaaaagcgcgctcaaaatgcggatcatgttgataaggctgacgcaacaaaatacagcgtgacagttgctggcacgcctggccctgcatcgacatcagccgctgaaaacggaacagcacgtcgctgtggcgaaaatgttcacgcaatgtttgatactgaatatgagaagagctggcacgctcgtgaatatcctgtgcgacaaagtaataatgcagcgtgcgacgcgttccccgttgaccacgatcgccacgtaagcgggtcagcagcgagagtttcgtctgattcaatgtcgccatcagcagaccgttggcgagagccaaatcgtacagcggtgcctggctttcatcttcaatatcaggatcaaacatgcgcgacttgagctcaagataacgcgccagttgttcatagcaacgcgccaggttgtcctgcagcgggcggaccgggaacagcagatgaccaataagtgtcaggacgttgtaccagacggcaccggccagcagatacatcggctgctgataccagtgctcatacagtgatgttcccaacatagtgtaaatggcgatcagcaatgcaccgaaggcaattgttgcatagcgttgacccagaccgccgagcaaaatgaagccgctggtagagagcgttaagccaatcgcaaatagccagggccagggaaacagcaattctactgaggccgaggcgataaaaaagcagaacagcgtaatgatgaggttacgcaaacgtcccgccagtcggtcatcgagatcggtcagcgccgctgccaccatccccagcgttagcggaatcgtcagttttacatcacccagccaccacggaaacgctgtggttccacaaagcgcaataaaaatacgcgcgtaatacagccaggcgctgttccaggtatagcgtttgagcaaaggacttagcataaaggccatattagtggattattcaaaacgacgacgtgcattggcttcacgcgcagcttgcgctgtttctaccgataccacgcgacgaccaaccggccatagtgcaatagcggcaattttaaagttcgcaatgccgacaggaatgccaatgattgaaatacattgtgcgatgcccgttgcaatgtgcatcaggcataaccaccagccaaagaaaatcagccagaaaatattcaataccgtaccgccagtattcagcagcacatttttgccagccgggttcagttcatcgacatgaatagcttcattgccataaggcaccagagacagtttagtgatctcccagcaggatcgtgtcagcggtaaggtaaaaatcagcgcaatactgaccagagtcgccaacagccagcccagagtggtggcaaatccgccaagcacaaagttcagaatgttcaaaacggtacgcataaaacctcgctttactgtggttttcagtaatgggcggcaattgtaacgtttttttgggctggagcacgttttctctgacggttacactgataagaaataatttcgtgtggatctacagagtcatggaactgaaagcgacaacgcttggaaaacgtctggcacagcacccttacgatcgggcggtgatcctcaatgccgggattaaagtctccggcgatcgccacgaataccttattcctttcaatcaattactggcgattcactgtaagcgcggtctggtatggggcgagctggaatttgtactgccggacgaaaaagtggtgcgtctgcacggtaccgaatggggcgagacgcagcgtttttaccatcatcttgatgctcactggcggcggtggagtggcgagatgagcgaaattgcgtctggtgttttacgccagcaactggatttgattgccacgcgcactggagaaaataaatggatgacgcgtgagcaaacctctggcgttcagcaacaaatccgccaggctttgtcggcgttgccgttgccggttaaccgactggaagaattcgataactgccgtgaggcgtggcgtaaatgtcaggcctggttgaaagatattgaaagcgctcggttgcagcataaccaggcgtataccgaagccatgcttaccgagtatgcggattttttccgccaggtcgagtcttcaccgctgaatccggcgcaggcccgggcagtcgttaatggcgagcattctctgttagtgctggcaggtgcaggaagcggaaaaacgtcggtgctggtggcccgtgcaggctggttgctggcgcgtggtgaagcgtcccctgagcaaattttattgctggcgtttggtcgcaaagccgctgaagagatggacgagcgtattcgcgaacggctacataccgaagacattaccgcacgcacgtttcatgcgctggcgctgcatattattcagcagggcagcaaaaaagttccgatagtcagcaaactggaaaatgataccgctgcccgtcatgaactctttattgctgagtggcgcaagcaatgcagcgaaaagaaagcgcaggcgaagggctggcggcaatggctgacggaagaaatgcagtggtcagtgccagaaggtaacttctgggatgatgaaaaattacagcgtcgtcttgcctcacgcctcgatcgttgggtaagtctgatgcggatgcacggtggtgcacaggcagaaatgattgccagtgcacccgaagagattcgcgatctgttcagtaaacgtatcaagttgatggccccgttattaaaagcctggaaaggtgcgctgaaggcagaaaacgctgtcgatttttcgggccttattcatcaggcgattgtgattctggagaaaggtcgctttatcagcccgtggaagcatattctggttgatgaatttcaggatatctcgccgcagcgggcagcgttgttagcggcattacgcaagcaaaacagtcagacgacgttgttcgccgttggtgatgactggcaggcgatttaccgattcagcggtgcgcaaatgtcgctcaccaccgctttccatgaaaactttggtgaaggcgaacgctgtgatttagacacgacttaccgttttaacagtcgtatcggtgaggtggcaaaccggtttattcagcagaacccaggccagctgaaaaagccgctaaacagcttaaccaatggagacaaaaaagccgtcacgttattggatgagagtcaacttgacgctttgctggataagctctctggttatgccaaaccggaagagcgcattctgatcctggcgcgttaccatcacatgaggcctgccagcctggaaaaagcggcaacacgctggccgaagttgcaaatcgactttatgaccattcatgccagcaaagggcaacaggcggattacgtcctcatcgttggcttgcaggagggaagtgatggttttccggctgcggcgcgggagtcgattatggaagaggcgctactgccaccggttgaggatttcccggacgctgaagaacggcggttaatgtacgtggcgctgacccgggcacgtcatcgggtatgggcactgtttaacaaagagaatccctctccctttgtggaaatactgaaaaatctggatgtgccggtggcgagaaaaccgtaagaaacaggtggcgtttgccacctgtgcaatattacttcagacggtccgcgagataacgctgataatcggggatcagaatatcgaccgcgtcgttgaaatgcggcgactggataatgaagtctgccgttgccacgttggtggcgaccggaatgttccataccgtcgccagacgcagcaaggctttcacgtcaggatcgtgcggcacggcatttagtggatcccagaagaaaatcaatacatcaattttcccttctgagatcaatgcgccaacctgctggtcaccccccattgggccactcaacatcgcgttgacgttcatgccggtcgcgcgggaaattaagttaccggtagtgcctgttgcatacagtacgtgttgttccagtaacggttgatgccgttccacccagctcatcagcatttgtttgcagtgatcgtgtgccaccagcgcaatatgtttccgcgcaggtaaagtgcgagtcgtcagttccataatgtacatccgtagttaactttcctacagattactgtaagcacttatcgctgcaagataaagaccgaaaaagcctgcgcacaggcacaaaaatctcaggaagatggttgtttttccgcccattgcaggaaagtatttcgcgtttgtgggtcagccagtttaaaccaatacttcagccgttgttctgtgagcacctgagactgcggtggaatagcatccagctcggaaacacccgaaagcagcgtactgtcatctgccatcatcgtggcaaattgcggtagtgaagcgcgtttcgcggatttgttatagcgttcaacctcgacctcataatcaatcgtttttgccgttgaggtaatggcgagaatatccagctttaccggaatcggcgtcgcatcgccatccaacaattcaaggcgcggngcggcatcaaaatggttagcttcccgctcattctccaggcgaggcaggcgaaaattgacctggttgatgagctgggtattaaaactgaccaccagcggtggggagatatacagccgttcttcactattggaaagatgaatcgtcttctcaacgcgaaacactaactgatgcggtccattatccagttcaatgctgtccgcaccgcgcagcagagagctggaaaccttcttgccgtcgagtaccagaagatcgacatcggttgaaagccgcagcgtggtggcaaaaacggataccggcaaacataatgcaatcaaggtggtcacgatgccggttttcataggtagctcctgtcaaaagaccgcccgaataataatgtgtcaaaatttttctttaatcatacttactaacatatagacatatttcccgcttttgctctcattcattcgtattagctgcatggttggcatgtcggctttgtcgtacactttgtgaaacagtctggaggaaataatgaaagaaaccgatattgcaggcattttaacgtccactcacaccattgcgctggtgggggcaagcgacaaacccgatcgtcccagctatcgcgtgatgaaatatctactcgaccaggggtatcacgtcattccggtttcgccaaaagttnnnnnnnnnacnnnnctgggccagcaggggtacggcacgctggcagacgttccggaaaaagtcgatatggtcgatgttttccgtaattcagaagcggcgtggggcgtagcgcaggaagctatcgccattggcgcgaaaaccctctggatgcaactgggggtgattaatgagcaagcggcagtactggcacgggatgccgggttgaatgtggtgatggatcgctgcccggctattgagatccctcgcctgggcctggccaaanaaaaaatccccggaaggcaaaaaccttccggggatctgttcagggattagttacgcagacgcggggcctggagttgtttgcggatggtctgcgccagctcatccatggatggctgttcaggatgttcatcctgcaattcgctacttagctgggcttcagccaggtaggtatgaaccggtaggccgttatcgtcctccatcaccacgtgataccacggagcggcgcgaagctcgtcattcaccgccagctcatcaggcgacggttcagagagcgaataaaccgggtcgatatccacgaccactccgagataacctaacagggaatggcggacctgctggccgataccgaatttgctggcaatcatagtcacctcccgggaaatctttacctttgatataagggtaaaattccacatttcaagttacatgacgcgacaggcaaaccctttcagatatagcccttccggataggtagcgatcaccggatgatcggccgcctgacggaactgctctataaattgtacatcacgaccggcatcaattgcggcatccgcgatgattttctgaaataaatcgctggtcatcagaccggaacaggagaaagtcaggagaataccgccttcattcagcagctgaatcgccagcatgttgatatctttatagccacgacacgcgcccatcaactggcttttattctcaacaaacttcggcgggtccatcacgataacgtcaaatttttcaccgcgatcgcgataggtacgcagcaatttaaagacatcatcacggacaaactcagccttgctcagatccagtttgttcagctcaacgttctgccgtgcaatatccagtgcttcctgggaggtatcaacgctgacaacctggctgcaaccgcccatcagtgccgatacggcgaaaccaccggtataggagaaacagttcagtacgcgtttattttcaacgtagcggcgggtagccaggcggctgtctcgctggtccaggtagtagcccgttttgtgtccgtgctgtatgtccaccagcagcttcatgccatgttcttcaatcggcagcagggcaggcggcaactcaccggtgacgaggccctgggtcagctccatcccttcttttttacgtaccgcaacatcgctgcgatcgtaaatcgcacattccgggtacagcgtttgcagggcactaattaatgccgcgcgctgatattctgcgccagcactcagcagttgcagcaccagaaaattaccgaaacgatcgatagtaatacccggcaggccatcagattctccggcgattaaacgatagctgtcgaggccatctttttgcgccagccagtcacgccatttttgtgcttgttgcaaacggcgggaaaaaaaagcaatgtcgatagactcagacgggtcaaacgtccagacgcgcgcccggatttgcgaagctggcgaataagcgccgcgtgctaaccattttccctgatgatcaacaatatcgatggtttcaccgaggctggctttaccttccatacgggcaacggccccggaaaagacccacggatggcgacgaagtaatgatttttcgcgccctttggctaacactaaacgtacactcataatttacttttctgtcgatgcaaagaaatgggcgtcattgtccggagttttccatggatttgcaacgcgtccattaaggataaggagagcagcaatgtcgaaagtctgcataattgcctgggtttacgggcgagttcagggcgtaggatttcgctacaccacacagtacgaagcgaaaagactgggcttaaccgggtacgccaaaaatcttgacgatggcagcgtggaagtggttgcctgcggtgaagaagggctggtagaaaaattaatgcagtggttaaagagtggcggcccgcgttctgcgcgtgtagaacgggtgctcagcgagccgcatcatccctcgggggaattaaccgattttcgtatccgttaaatacattttaccggttttggcaggccagcaattttggtggcttgcttagccggacctttcggaaacagtcggtataaatagcggctgttacctttttcttcgccaaatttattcgccatcgcttttaccagcatacgaatcgccggagaagtattgaattccagatagaaatcacgcacaaaacgcaccacttcccagtgttctggcgacagcgaaatcccttcgttctctgcaatcaccactgccagcggctcactccactggctgctttctttgagatagccttcggtatccgtttctatctctttaccttcgaagatcagcataattattactaccttaatcagactgccggcagtgtaacaaaaaacaaagccccgcataaagcgaggctatgaaagtgttagcgggtgagattaatcgcggctggcgaagcccagaatgctcagcaggctgacgaagatgttgtacagcgaaacatacaggctaaccgtggcacgaatatagttcgtttcaccgccatgaatgatgttgctggtttcaaacaaaatagcgccagaggagatcaaaatgaagaccgcgctgatcgccagatgcagagcaggcagctgcaggaagatattagcaaccataccaatcagcaccaccacaatacccgccatcagcataccgccgaggaacgacatatctttgcgggtggtcagcacatatgcagagcagcagaagaacactaacgccgttccgcccagtgccatagcgattacgtcacccattccggcagacagataggtattcagaattggtccgaggatataacccagaaaaccggtaaaggcgaatgcggagataatcccggtcggcttattcgccnttttataggtcaagaacatcaaaccatacatacccaccagcgtcagaatcagacccggagatggcagcatcagcaccgtactggcagttgcggtaatcgccgaaaaggccagcgtcaggctcagcagaaaataggtattacgcagcactttatgggtgctaagcagtgatgtacggtcatgtgaagaactaacaatacgatccattgagtcactctctatgacagatgtaattaattaagcagcataatgataatgcgtaagggcacccagtagttttacccatctttacgcatttgatctggaacaggtttaacagcggattatcaggtcattaagcaaatataacgccctgagaatttcgacaggcaaaagaaaaaggggttagcatttagctaaccccttatcttatctggcggaagcgcagagattcgaactctggaaccctttcgggtcgccggttttcaagaccggtgccttcaaccgctcggccacacttccggaatgacgcgcactataaacatcccgatgcggcgtgtaaacccctaatctgtttgtttgcctaaaaaacagccaaaagtgcattgatagcgtgaaataaaagcagattgatcatttcatcaccataaattccttctcttttactcgtttagcaactggctaaacatcccaccgcccggcaaaaagaaaaataggtccatttttatcgctaaaagataaatccacacagtttgtattgttttgtgcaaaagtttcactacgctttattaacaatactttctggcgacgtgcgccagtgcagaaggatgagctttcgttttcagcatctcacgtgaagcgatggtttgccttgctacagggacgtcgcttgccgaccataagcgcccggtgtcctgccggtgtcgcaaggagaagagacgtgcgatatgaataacgaggaaacattttaccaggccatgcggcgtcagggcgttacccggcgcagctttctcaaatattgtagtctggctgccacgtcgctgggattaggcgcgggaatggcaccaaagattgcctgggcgctggagaacaaaccgcgcattccggtggtatggatccacggtctggaatgcacctgctgtaccgaatcttttatccgctccgctcacccgctggcaaaggacgtcatcctttccctgatttccctcgattacgacgatactttgatggctgccgccggaacccaggcggaagaagtctttgaagacatcatcacgcaatacaatggcaaatatatcctcgcagtagaaggtaatccgccgctgggcgagcaggggatgttctgtatcagcagcggtcgaccgtttattgagaaactcaaacgtgccgctgccggagccagcgcgattatcgcctggggaacctgtgcgtcctggggctgcgtgcaggccgcgcgacctaatccgacacaggcaacgtctatcgacaaagtcatcaccgacaaacccattatcaaagtacctggctgcccgccgatcccggatgtgatgagcgccatcattacttacatggtgacctttgatcgcttgccagatgtcgacagaatgggtcgtccactgatgttttatggtcagcgtatccacgataaatgctatcgccgcgctcacttcgacgccggagagttcgtccagagttgggatgatgacgctgcccgcaaaggttattgcctgtacaaaatgggctgcaaagggcctaccacctataacgcctgttcctccacacgctggaatgatggcgtttctttcccaatccagtctggtcacggctgcctgggctgtgcggaaaatggtttctgggatcgcggttcgttctacagccgcgtggtcgatattccacaaatgggtactcattcctccgccgataccgtcggtttaaccgcgcttggtgtggtggcagcggctgttggtgtgcacgcagtcgccagcgccgttgaccagcgcagacgtcataatcagcaacctacagaaaccgaacatcagccaggcaatgaggataaacaggcatgagcactcagtacgaaactcagggatacaccatcaataatgccggacgccgcctggtggtcgacccgattacgcgcattgaaggccacatgcgctgcgaagtgaatattaacgatcagaatgtaatcaccaatgccgtctcctgcggcaccatgtttcgcgggctggagatcatcctgcaagggcgcgacccgcgcgatgcgtgggcgttcgttgaacgtatctgcggcgtctgtactggcgtacacgctctggcttcggtttacgccatcgaagatgccatcggtattaaagtgccggacaacgccaatatcatccgcaacattatgctggcaacgctctggtgccacgatcatctggtgcacttctatcagcttgccgggatggactggatcgatgtgttggatgcgctgaaagccgacccgcggaaaacctccgaactggcgcaaagtctctcctcttggccgaaatcatcccctggctatttcttcgacgtacaaaaccgcctgaagaaattcgttgaaggcgggcagttggggatcttccgcaatggctactgggggcacccgcagtacaagttgccgccagaagccaacctgatgggctttgcccactatctcgaagctctcgatttccagcgtgaaattgtcaaaatccacgcggtctttggcggtaaaaacccgcatccaaactggattgtcggcgggatgccttgcgccattaacattgacgaaagcggcgcggtcggggcggtcaatatggaacgcctgaacctggtgcagtcgattatcacccgcacggcagacttcattaacaacgtgatgatccccgacgccttagccatcggtcagttcaacaaaccgtggagcgaaatcggcacgggtctttctgataaatgtgtcctcagctacggcgcattcccggatattgccaacgactttggtgagaaaagtctgctgatgcctggcggcgcggtgattaacggcgacttcaacaatgtgctgccagtggatttggttgatccgcagcaggtgcaggagtttgtcgatcacgcctggtatcgttatcccaacgatcaggtcgggcgtcatccgttcgatggcatcaccgacccgtggtacaaccccggcgatgtcaaaggcagcgataccaacattcagcagctgaatgaacaggaacgctactcgtggatcaaagcgccgcgctggcgcggtaacgcgatggaagtggggccgctggcacgcacgttaatcgcttatcacaaaggcgatgctgcgaccgttgagtcggtcgatcgcatgatgtcggcgctgaacctgccgctttccggtatccagtcaacgttgggccgcattttgtgccgcgcgcacgaagcacagtgggccgcaggtaagttgcagtatttcttcaacaagctgatgactaacctgaaaaacggcaatcttgccaccgcctccacggaaaaatgggaacccacaacctggccgacagagtgccgtggtgtcggttttaccgaagcgccgcgcggggcgttaggccactgggccgncattcgcgatggcaagattgatctctaccagtgcgtggtgccgaccacctggaacgccagcccgcgcgatcccaaagggcagattggcgcttatgaagcggcgctgatgaacaccaaaatggcgatccccgagcaaccgctggagatcctgcgtactctgcacagctttgatccgtgcctcgcctgttcaacacacgtgctgggcgacgacggtagcgagctgatctccgtgcaggtgcgttaacagcgaaggagaatcatcatgcaacagaaaagcgacaacgttgtcagccactatgtctttgaagcgccagtgcgtatctggcactggctgacggtgttatgcatggcggtgttgatggtcaccggttactttatcggcaaaccgctaccttccgtcagcggcgaggcgacgtatctgttctatatgggctacatcaggttaattcacttcagcgccgggatggtttttaccgtggtcttgctgatgcggatctactgggcttttgttggcaatcgatactcccgcgagctgtttatcgtgccagtatggcgtaaaagctggtggcagggcgtgtggtatgaaatccgctggtatctgtttctggcaaaacgtccgagtgccgatataggccataaccccatcgcccaggcggcgatgtttggctatttcctgatgtcggtctttatgatcatcaccggctttgcgctgtacagcgaacacagccagtacgctatttttgcgccgttccgttatgtggtggaatttttctactggacgggaggcaactcaatggacattcacagctggcatcggctggggatgtggctgattggcgcgtttgtgatcggtcatgtctatatggcgctgcgtgaagacatcatgtccgacgacacggtgatctccaccatggtcaacggctaccgtagccacaaatttggcaaaataagtaacaaggagcgttcatgagcgagcaacgcgtggtggtaatggggctgggcaacctgctgtgggccgatgaaggtttcggcgtgcgggtggcggaacggttgtatgcccattaccactggcccgagtctgtggagattgtcgatggcggtactcagggactgaacttgctggggtatgtcgaaagcgccagccatctgttgattctcgatgccattgactacgggctggaaccaggaacgctgcgaacctatgccggagaacgtattccggcttatctcagcgcgaagaaaatgagcctgcaccagaacagtttctccgaagtgctggcgctggcagatatccgcggacatctgccagcacatattgccctcgtcggtctgcaacccgcaatgctcgacgactacggcggcagcctgagcgaactggcacgggagcaactgcccgcagcggaacaggcggcgctggcgcagctggctgcatggggaattgtgccgcaaccggctaatgaatcgcgctgtctcaattatgactgtctgtcgatggaaaattacgaaggcgttcgcttgcgccagtacaggatgacactggaggagcagggatgagcaacgacacgccatttgatgcgttgtggcaacgaatgctggcgcgcggctggacgccggttagtgaattccgtcttgacgactggcttacgcaagcgccagacggcgtggtgttattaagcagtgacccgaaacgcacgccagaggtcagcgataatccggtaatgattggcgaattactgcgcgagtttcccgactacacatggcaggtggcgattgctgaccttgaacagagcgaagccatcggagatcgctttggcgtctttcgctttcccgccacattagtgtttaccggcggaaactatcgcggcgtgctgaatggtattcacccgtgggcggaactgataaacctgatgcgtgggcttgtcgaaccacagcaggagcgtgcntcatgagcgaaacttttttccatctgctggggccaagaacgcaaccgaacgatgacagtttcagcatgaatccactgccgatcacctgtcaggtgaatgatgaaccgagtatggcggccctggagcaatgtgctcacagcccgcaggtgattgtgctgttaaacgagttacaacatcaactaagtcaacgccagccgccgttgggcgaggtgctggcagtcgatctgttaaatctcaacgccgacgatcgtcactttatcaatacgcttctcggggaaggtgaagtgtcagtgcgcattcagcaggctgacgacagcgaaagtgaaatacaggaggcgatcttctgcggattatggcgggtgcgcagacgtcgcggcgaaaagttgctggaggacaaactggaggctggctgcgcgccgctggcgttgtggcaggcggcaacgcaaaatctcttgccgacagattcgctgttaccgccgcccattgatggcctgatgaatggcctaccgttggcgcatgagttactggcgcatgtacgtaaccccgacgcgcagccgcacagcattaatctgacgcaattacccatcagcgaggctgatcggctttttctctcacgtctctgtgggccgggaaatattcagattcgtaccattggctatggcgagagctatatcaacgccacggggttacgccatgtctggcatttacgctgtacggacaccttaaaaggcccgttactggaaagttatgaaatctgcccaataccggaagtggtgctggcagcgccagaagatttggtcgactctgcgcagcggcttagtgaggtatgtcagtggctggcggaagctgcaccgacgtaaaaagacggtaagtatcgctttcaggcttatgaatatcgcaatcggcgaatacctctggtcgtagagtttcaggataaagagggagatctaccattaacgggttatttttctctcttcgcctacaggagtgcgcatgtgggatgtcattgatttatcgcgctggcagtttgctctgaccgcgctgtatcactttttatttgtaccccttaccctggggctgatttttttgctggctatcatggaaaccatttacgtggtcaccggcaaaacaatctaccgcgatatgacgcgcttctggggtaagctcttcggtatcaactttgctcttggcgtggctaccggcctgaccatggagtttcagtttggtactaactggtcattctattccaactatgtgggcgatatttttggcgcaccgctggcgatggaagcattaatggccttcttcctcgaatccacctttgtcgggcttttcttcttcggctggcagcggctgaataaataccagcacctgctggtgacgtggctggtggcgttcggttcaaatctctctgcattgtggatattgaatgccaacggttggatgcaatacccgaccggtgcgcattttgatatcgacaccctgcgtatggagatgaccagcttcagcgagctggtctttaacccggtcagccaggtgaaatttgtgcacaccgtaatggcgggctacgtgaccggggccatgtttattatggcgatcagcgcctggtatttactgcgcggacgggagcgcgatgtcgcattacgctcgtttgccatcggttccgtcttcggtactctggcgattatcggtaccctgcaactcggagacagttctgcgtatgaagtcgcgcaagtacaaccggtaaaactggcggcgatggaaggggagtggcaaacggaacctgctcctgcaccgttccatgtggttgcctggccggaacaggatcaagagcgtaacgcctttgccatcaaaattcccgtgctgttagggatcctcgccactcactcattagataaacccgtgccgggtctgaagaatttgatggctgaaacctacccacgcttgcaacgcggacgtatggcctggctgttaatgcaggaaatatcgcaaggcaatcgtgagccgcatgtgttgcaggcattccgggagctggaaggcgacctgggctacggcatgttgctctcccgctatgcgccggatatgaatcatgtcacagccgcacagtaccaggcggcgatgcgtggcgcgatacctcaggttgcgccggtattctggagtttccgcatcatggtgggctgtggttccctgctgctactggtgatgctgattgcgcttgtccagacgctgcgtggcaaaatcgaccagcatcgctgggtgctgaaaatggcgctctggagtttgccgttgccgtggattgcgattgaagccgggtggtttatgaccgagtttggtcgtcagccgtgggcgatacaggacatcttaccgacatactccgcgcactccgctttaaccacaggacaactggctttctcactgatcatgatcgtagggctttacaccctgttcttaatcgccgaagtctacctgatgcagaaatatgcccgtctggggccgagcgcgatgcagagtgaacaaccgacgcagcaacaggggtaaaggagaaaatcatgtttgattatgaaacattgcgcttcatctggtggctgctgattggcgtgatcctggtggtctttatgatctccgacggatttgacatggggattggctgtttgctgccgctggtggcgcgtgatgatgatgaacgccggatagtgattaatagcgttggtgcgcactgggaaggcaatcaggtctggttgatcctcgcaggtggggcattatttgccgcctggcccagagtgtatgcagcggcgttttccggcttttatgtggcgatgatcctggtgctgtgctcgctgttcttccgcccgctggcctttgattatcgcggaaaaatcgccgatgcacgctggcgtaaaatgtgggatgccggtctggtcatcggcagtctagtgccgccggtagtcttcggtatcgccttcggcaacttgttgctcggcgtgccgtttgccttcactccgcaattacgcgtggagtatctcggcagcttctggcaactgctgacgccattccctttattgtgcggattgctcagccttgggatggtgattttgcaaggtggcgtctggttacaactgaaaactgttggtgtgattcatctgcgttcacagctgtcgactaaacgcgctgcactgttggtgatgctgtgctttttgctggcgggttactggctgtgggtcggtattgatggctttgtactgctcgcccaggatgctaacggtccttccaatccgttaatgaaactggtggcagtgctacctggtgcctggatgaataattttgtcgagtcgcccgttttgtggatcttcccgctgctggggttcttctgcccattgctgacggtgatggcgatttatcgtggccgcccgggttggggatttttgatggcgtcattgatgcaatttggcgtgattttcacggcaggcatcacgctgttcccctttgtcatgccgtcaagcgtgagtccaatctccagcctgacgttgtgggacagcacttccagtcagctgacgctgagtattatgttggtaatcgtgctgatatttttgcccattgtgttgctctacactctctggagctactacaaaatgtgggggcgcatgacgacagaaactctccgccgtaacgaaaacgagctgtactaaggagcaggaacaatgtggtatttactttggttcgtcggcattttgttgatgtgttcgctctccacccttgtgttggtatggctggacccgcgattgaaaagttaacgaacgtaagtctgatgcggcgcattagcgtcgtatcaggcaatcaataatgtcggatatgaaaagcggaaacatatcgatgaaagcgatcttgatcccatttttatctcttctgattccgttaaccccgcaatctgcattcgctcagagtgagccggagccggagctgaagctggaaagtgtggtgattgtcagtcgtcatggtgtgcgtgccccaaccaaggccacgcaactgatgcaggatgtcaccccagacgcatggccaaactggccggtaaaactgggttggctgacaccgcgcggtggtgagctaatcgcttatctcggacattaccaacgccagcgtctggtagccgacggattgctgacgaaaaagggctgcccgcagcctggtcaggtcgcgattattgctgatgtcgacgagcgtacccgtaaaacaggcgaagccttcgccgccgggctggcacctgactgtgcaataaccgtacatacccaggcagatacgtccagtcccgatccgttatttaatcctctaaaaactggcgtttgccaactggataacgcgaacgtgactgacgcgatcctcagcagggcaggagggtcaattgctgactttaccgggcatcggcaaacggcgtttcgcgaactggaacgggtgcttaattttccgcaatcaaacttgtgccttaaccgtgagaaacaggacgaaagctgttcattaacgcaggcattaccatcggaactcaaggtgagcgccgacaatgtctcattaaccggtgcggtaagcctcgcatcaatgctgacggaaatatttctcctgcaacaggcacagggaatgccggagccggggtggggaaggatcactgattcacaccagtggaacacgttgctaagtttgcataacgcgcaattttatttactacaacgcacgccagaggttgcccgcagccgcgccaccccgttgttggatttgatcatgatagcgttgactccccatccaccgcaaaaacaggcgtatggtgtgacattacccacttcagtgctgtttatcgccggacacgatactaatctggcaaatctcggcggcgcactggagctcaactggacgcttccaggtcagccggataacacgccgccaggtggtgaactggtgtttgaacgctggcgtcggctaagcgataacagccagtggattcaggtttcgctggtcttccagactttacagcagatgcgtgataaaactccgctgtcattaaatacgccgcccggagaggtgaaactgaccctggcaggatgtgaagagcgaaatgcgcagggcatgtgttcgttggccggttttacgcaaatcgtgaatgaagcacgcataccggcgtgcagtttgtaatgtataaaaaagagcattcagctacctgaatgctctgaggctgatgacaaacgaagaactgtctaatgcgtagaccggaaaaggcgttcacgccgcatccggtcactttaccttcagttttactctttctcggagtaactataaccgtaatagttatagccgtaactgtaagcggtgctggcgcgtttaatcacaccattgaggattgcgcctttaatattaacgccagcctgttccagacgctgcattgacaagctcacctctttggcggtgttcaagccaaaacgcgcaaccagcaggctggtgccgacagagcgccccacgaccgcagcatcgctcaccgccagcatcggcggcgtatcaacaatcaccagatcgtaatggtcgttcgcccattccagtaattgacgcatccgatcgcgcatcagcagttcagatgggttaggtggcacctgaccgcgagtaatcacatcaaagcctcctttgccaaaatgctggatcactttgttgagctcatctttacctgccagatattccgacaagccatgttcattactcacggtaaacaggttatgcgaataaccacggcgtaagtcggcatcaataaataacactttttgatcggactgggcgatcaccgctgccagagttgaactgacaaacgttttaccactgtctggcgtcgcaccggtgatcatcagaatgttattctcagtctccatcatagcgaaatgcagactggttcgtagcgcacgtacggcttccacagcagaatccgccgggttatccaccgccaggaaggggatatttttagtacgatggcgctgctgattagaaaataaatttttcttacgcagacgggtacgtttatccagccactcggacatcgggatggtggcataaacgctgatgccgtgctcttccagttgttccggggcttctacaccacgacgcaacatcgcacgcgccagcacggcacccaccgaaataaacaggccaagaataaaaccaagcaccacattcaacgcttttttcggtttcactggctgcggctgagtgactgccgggtcgataatccgcacgttaccaatggcactggatttcgaaatactcaactcctgctggcggttaagtaattgcagatataccgcacggcccgcttctacgtcacgacttaaacgcaacacttcctgttgggtggaaggcatagccgatacccgcttattcaggcgtttgcgttcttgctccagcgtctggcgtttttccagcagcgcacgataagttgggtgatctttcttatacagctgggagatctctgcctcgcggaaggtcagctcattgagttgattatcaacgttcacaatctgctcaagaacggctttggcttccaggttaaggtcaaccgaatcgcgctgctggcgataaacgttgagtttttcttccgcctggtccagctcgctgcgcacttctggcaactggcgctgtaagaattcaaggctttgtgaatcctgcgccgcctggcgagcgatattctgttgcaaatagttgttagcgatgctgttcagaatacgagtaatcaactggggatcatcaccagtcatggtaagttccagcatcccgctttctttactgcgttcgctaacggtaaaggtttcctgcaacgcgttaatcgcttccagttcggtacgttggctcaggacaaactgtgttcctggtttggccttaatatccgcgatagtcagcgcaacgccatctttttccagacgctggccgaccgtaccattgacggtgaactcttcaccttccagcgtatagtggccgttttccccaaccgtgagtgtcagttgctgatcctgaccattcagttgtggaatatgcatccagctgatcgccagctcacctggtttctctttggttaatctcgcccagccgcgacccacaatcggaaaatacttctgctcaaccatgtcgcgcagattcagttcagcaatggttttaccgagaatcatgcgcgattgcagcagttggatctccggtgcagactcgggcgatgagttagggatcatatcactcaggccgctgagaatggcgttgccctgtttttgctcaacctggaccagagtatctgcctgataaattggtgtgcttaacagcgagtaagcgacagcgatcagcgtgaataacgcggtcacgctgataataaacttacggtgatcccataactcgccgaccagacgaagcagatcgatctcattttcctgagtgctgcctggtggcgtattcatatttttagttgtcatcgtattttataaactcaaattaccggctgaggcgcttcgcccattcctgactggcgcgctccaacattccgtagacatgttcaaatgcatcctgacttttacgatagggatccgggatctctttctgttccagccattgcccaaacagcattgtcttcccgcggacctcgggagcgattgcggtaacctgagcaatatgttccgactccattgccagaatcagatcgtaatttcgtgccatctcagcagtgagcttacgtccggcatgtccttcaagagatacgccatgattagcggcaacatctgccgctgtcgcatctgcagggtgttttaccagaccatgaacacctgccgatttgacttttacgcccggcagacgtttacgcagcaagcgctcgccaatgggcgaacggcaaatgttgccggtacaaaccaccaggattgagttaaattttagttgggccatgtttgaatccaccgtgaagtctctgtcaggtcatgcaccccggaaatcgtcggtaccagcagggaaatcacacggttccaacgagccagaggcgcggtagtgacataaacaatgtcgtaaggttcaagctggaattccgttccgagtatcattgccgatgcgtccttcgcattcagctgataaatattggcgattttgccattctgcttgttttgcgttgcacgaataacaaaaatccccgtcgcatcagcgacatcctgattcataccctcagcgttacccagcgcttccgccagggtcataccgctgcggtccattttcagcgtgctctgtttacccacttcacccatcacgaagactttcagatcatcgttgcgcggaataaataaaatatctcccgggtgcagcagtttgttctggcgcaagtcgccacgctgcatcagcgcatagaggttcactttggtctttacgccattctgggtgagcaccacattgcgccagtctgcatctgcggtcagaccgcccgcggcgttnatcgcatccatgatggtcagaggaatattggtaatcggctgctgacccgatttgctgacttcaccggtgacgtacgctttttgcgagcggaacgccgcgacgctgacatcgacttgcgggctttcaatgactgaatccagacgcgctgtaatctcgttgcgtacctgggtaagtgttttcccggccactttcaggcgaccaatataggggtagaaaatcgcaccatcggcgttaacccagttgccggtatcactggcgctacggtattgccctgcgggggtggttagttccgggtgatcccagaccgtaaccatcaacacatcaccaatgccgatacgatattcatagttcgcgatttgctgctccagctccgggttagcctgcgacataatcggtttggcgcgcaactgatcaatcaatcctggcgtgacgggatagatattgaccattttgtccaggtcatactgattgtcaggtagttcaatgacatccttgttactggtcgataaattctgaccaggaacaagggtacatgctgtcaaagacagaacagccaatgtcagtaccgaaaacttaaaaatgttctttttcattggtttatatttatcagtcaatgtaatgttatgaattacgtcaggttattgtccaaccggtacttctcgctctgccgtcattggatagagctggtatttgcgtgacagcatttgtccaccatcacgcgtcaatggtgtccacgaaaccacngcgcggttgcggttaggtccaatggtcatcaagtcgaacggaatcgagatataaaaacctttactaaagccgccttcgccgtagtcatctttagatacgttactgattgccgcccatacccctaccgccacgccgctgtcaaagcgtttggcgacgtcgatcgttgcccctttatcttttgccagatattgcccaacgctaagtttcatcagtacgccattgagcgtcggcgggttccagtaagccgtcacgaaaccagttggcgtggaataatcggtgaagcgcatcatgttgtcccagtcacgctgcttcacgtagttaacgtccacacccagcgcccagctggcatctagcgggcgataaagcagctcggaaccgacaccggcatacatcgtttccagataaccgccatacacctggccatagaaaccattgcctaagtcggcaaagtaattcgcttgcaagttgttgagataaacgtcattgcgaacgtaatcacggatatgcgtgcgcacgcggggcagggtagagtccgcgggcaacagcgaagacttaaacttgtcgtagttgttgtaaatattggtgaaaataccgccatcaagcagcaggtggtcggtaaaccagtagcgggcgctggacatcagccccagctggaacatatagaaatcttccgggccgcccagcgactgtgaaagtgttgggttgaaagagtagctaaagcgatcttcacgaatacggtagccccgaccaaaggcagaaagatcttcagcttcaacacgttgttgttgcagtggctctgattgaccaggcgctgtacctgccagctgtttgcgcaggctggctacgtcggtttcggtagtcaccatcgccatatgctcgcgcttttgcgtcacgctaatcttctcaacgccttgcggcaggttattcaccagaatccggttggcacgatcgaccgcttcacgagagtcacggtatttgtattgctgaccagacatatacagcgtcttatcgcgtagctgaatttctggcgcgtcaaagcccgcgttatacttcagggcggtaagttggtttgctaccgtggtgtactgcaatccttcagattcaggcgcaggttgatatgccggttttggcgtatcgcgcagggcagggcgcagatcgttgaaattggtccgtaaagtgaaaccaaacatcaacgtgttaccgcgttcataactcaggttgaggtctgcccagctggcagcgcgataaactgcaccgacgttgaaatggcttgcctgaggcagtttgccagcgaaatcattctggtaattgtngccgtcgtattcgagtttcagacgcaggggattccacggcgtttgatactcaatgccgccaaagatggaagccgggccacgaaagatatcgctaaagctgatatcgcccgcatcgtgagactctgcgcgatgacaatatttatcgctcacccggcaaaacgggttggtaatattgcccgcattaccggcgtagccccatgccatcccgagggtgaaatcaaatggccccgcttgcttgctggccaccagatactcaccgtcaaacagacccgtaccagcaatatcacgtttaccaaacgccacttgcggtagccagtaaccttcttcccacaggcgaagtttaaaatcgaatgatttgtctttgtatgactgatcgccgctgaaatcttcccactggctatatttacgtgtgcgcacatccgtataacgaatggtgccttccagccatgggaacagcgccacggaggtggagtagaaacggtattgatcgttatcccggtagttgacgctgaattcaccttccggtgcgatgcgcgcatttggcatctgcaacaatcctgtgccgccaaagtccgattgcgacgaacccagcggatccgggtaggttaatacttcagcatgacaggcactggagacggcaatggccaggcagcttaaaagataagaattcttcttcatcagtcaggaacacgttgcgttaaaacagacacaatctggtcatttaaatcagcatatttttcgggcagtacatgcgcagaaaagcctaaccaaagctggctgccaggcggtggttccacatgtcttttattccacagggcaacaggggcgacgacagtctcaccctcaggcgtaatcacgataacgttattcttgtccgcgcctgcaagacgggggtgatcttgcagataatcggtaacgctacggcctgcctgccagggcaattgcccagccccagaaaccgcacccagaagagtaatagtcaccgggcgctgtacggtatagagcgtatagttcccgaccagcgggggattgctgttctcatccactcgtacaaaatcagggtccagtttgaccggtaagcgaccagtaatattgagattgagtaactgctggcgcacggatttaatcgttgccgccacatcgtcgtcagcttctgcttcccaggaagcaagctgtgccatgacatgttggtagtctttaagcgctttagctttcaccgcggagtcggtcagcagggtaccaggccaccagaggcgatcgcgcagttgcggttgtgtcactaactgggcaacattctccacggggccaacggaaagtgtctgttgttcgccaggcagataaatagtcaccgttccttgcgcaaaggcatggggtgtcattacgtaaagtacgctggcaatgaaatacgactgtaatttattcatggtgcgggtttaagaaacgtcatttctacgggaataacccctgcgcctaacatttgccgactttgacgaacctggccagtagccgaatcgacccagaatgtgttttgccactgtttttctggtagcgtggaagtcacctcttcctgccagacattacacagcacatcgcgacccgcaatatgcagcgtctctaatccagcaaaggaaaaagtggaactcagggtcgcagagcgaaaatggttgtctttactccagagaatatcgcgcgtccagcggctgccgtcttttattgccagcgcgttacgcagagggtcctgcccggaatttgtcacttccagcagattattattaagtttgacggtctttaaaagacgtccattgtgggtaaccagcatggcgttatcctgggataaccatttgctttgttcttgttctatatatcccagtaccacaaagattcgttgcccttcattaaggcgtaaatacatcgtggaataaggcaacgcctggatctgctgatccgctacggtgatatcctgattatcgaaaaggctggcgcgaaatgtatcgaccatactttgctggctgtgcgtacatcccgcaagaaatagtgcgaaaatcgataaaataagagggcgcacctttaatccttgaaaggttaattaaaaaaatgcaaatctctaaagcccggtacgaatatcgcaaccgggtattatttaactttaatttcgacgcgtttaagcagaattagcgcgtagtggacgtggtggttgaggtgttatgagaaccgccatcgccactgtcatttgctgcaactactgccaacgtcgccacaccaacagccgttgccacaccgacaactgtcgccgtgccgacagcgccagcagccacgccaccagtggtagcagccgtcgtggttgcaccggtagtggtcgttgtggtgccagtagtacccgtcgttgcctcggtcccgtttgctgcttcaggggcagcaaacgcagctggcgtcgtcaacatgaaggccataaggattgcagaaagcttgtgtttcataacttttcctttattcatcgcatggacaatacgtacgcttgagatcaggattgtctactttgagtataacatccttgtgaaatctccctttcctcataccacttgcactatatacagcgggtgagaaaggcgcgcagagggaaatataagattgttaactattcccctctggaaatacgacctgtgagcataagataaatcttagcaaaatacaaattaaagataagaaaattgttaagaaagctattaactattattggcaatatagtttcaagtggtactataactcgctgttaagtggcatttataactattagttgtagagatattcggttaaatggattagttttccggtgaaaaagtaacttgtgttataatacatggtgttgactattgaactatgccaataaaaccagtcagctttaaacaagcagcgtcatattaagagagataaacatttgccgctgttggtcctcgcaggccatttacgcggcaaaattccacgcgtaatcctggtataagcacttctgcgtcgcggggagtgaatgcggaaatatggacctgaacttctttacgaccgtcggaggggataatgaatcctttgccgcttttgcgatcaaaggttttgacaattcctgtcattttacgggacaaacaaattccttactgaaaatactgcgctgcactatacggggttaataaaataaagccagcgatatttaagaccgcnngnnnnnnnnnnnnaaatttgcttaatctcaattatcatgcgttaatagctgcgtcggttggaaagacagacagcatacaaagtagtttactaaagcagttctcattatcaggcattatccccttcttttgagtctctctcctgaacactaagtagtttctgtattaaagccctgtttgccgaaaggcccaaaatgaaggaagtaaaatatgtctaataaaatgactggtttagtaaaatggtttaacgcagataaaggttttggctttatcactcctgatgatggcagcaaagacgttttcgtccatttcaccgccatccagagcaatgaattccgcacgctgaacgaaaatcagaaagttgaattttctattgagcagggtcaacgtggccccgcggcagcgaacgtagttacgntctaaggttgcngttattactcaacatctccattttcgctgtccatgttgtcatggttcacagtaccgnacatcggcattcgatgtgacggagcgaaaccctttgggcgctaagtgtattttttgtaaatcgacgatgatcacctttgataacgtcgcgctgcaaatacgcactgaccatgcaccgctggatttcacaaaataatatcaggctcccttgtggagccttttttatatctgtcttattttttttcaacgctgtatgtatagtaagcgataacctgttgattattgaatctttcggggagatggcttataacatttcttacctgaccagggtaccgggaaccaacaccttactggcgtgttgctgtcttttaagaccagaagaggttaacagtgaatattgaagagttaaaaaacaagccgaaacggaaatcgccgactttatcgcgcaaaaaatcgccgagctgaacaagaatacagggaaagaagtctctgaaattcgcttcaccgcgcgagaaaaaatgaccgggcttgaaagttatgatgtcaaaatcaaaataatgtgattttgtgaacatcaccccgtgcgaggtgatgttccgcttgttgctaatttagtgaccaatcattggcgcttgcggaattaagcgtcggtacaattcctccggcactgggctttgccatactcctgcatacattgcgtaaccaatcaccgtaaacataatccccagaaccagtagcgtcattaaccagccagacaacgcaaaggcttttttatttgccgcaggtttttgcagtgaaaaggtcaatgttgaggctaccggacatgactctacgcaagtcatacagccggtacattccactgttcgtacctgaattaatttatcgaccgggatccgtgatgggcaattttttgcgcatttgccacaatcgatacaactttcggcattgcgacgaatcttaaatggcgataatagcgaaaccacgcccatcagcgcgccatatgggcaaagataacgacaccaggcatggcgaataaacaggctggcaatcagcaaaacggtcacgctgattaatgtcgcggtccccatatgacgaaagaaatcgagcattttaacgtccatcaccacgctgtagggcgacaacataaaatagtgaatcgcctgagcaggcatcaataacgcgatatagagaaaaaaactcaacagcaaatactttacaccgcgcagaggaatatccagccagcggggaaggacacattgccgaccaaacagtttgttaccgagagcgccgattaattcagaaagcgtaccaaccgggcataaccatgagcaaaaggcctttttgagtaatagactgatgacgataaaagcgaccaataacagcatcgcggcggcgtggacggacggtaactgacctgttgcaaggctatatttcagattcatcagaccggcaatcggtagccagccttcgatacctcccggtctggcgacaaatatcgtactacctgccgtttcgtaatagcgcacccaataccagaacgtgatggcaatataaatattcattgccaacagcaataantgcgtcgctttacgccaggtcgtggcattgtgccagtcattccacggtaatttgccgcccgtcgtgcctggccgccgctgccagcgggttctttttttctctgccatgattttgccagtccgttaagttgcataccagatgccactattctagttattcttaactggctgatattgattcaaatcgcgttcaggtctttcttattcaaccatgcttccagagcggcaacactgcgtgtaatttcttcgtgtggaaggggggcagataatggctgctgctccagttgtgcgcagagctggctggcgctacgcattcccagactcgagcaactgctttttagctgatgcgcggcacgctttattttctcgctatcctgagtggcgcgggcaatgtcgatttcatcgagaagcggcagggcatgttgtgtaaataatgccagccattcgtggatcttctccgtccccattaactgagcgtcttcattgagttgcgatacatccagtggtagatcgttattggcttgcagttggagatagtgcgccagtaactgaccgagcacttcacgcggcaccggtttagggataatcccgcgaaatagtgaactggtacgctggcgcagcgtttcgtcaatgacatgggcgctaaagccaatcaaaaccagcgacggatattgtcgtgccagttgtcgggcaagcgtaatgccgttgacatccggcagatcaaaatccaccagtgcggcagcaaacggttcgctattttgcagtgtctctaaagcctgcgcggcattgccaatagcaacaacctgcgcaccactggtgttcagcatctcaacggtaattcgctgggttagcgggttatcttcaattaacagcaaacgtaaaccgtcaagacgcaccgcctgattgactgtttttggcacgggtgccgtggcaacacgtaacggcaagcgtaaacaaaaacagcttccaacctccggcgtgctggtggcgctcagttcgccgcccatcgcctgggccagacggctactgatagtcagccccagcccggtgccgccgcgtttgccacttacctgaataaatggctggaagatttctgccagtttcgcgggatcaataccgcagccgctgtcttccacttcgaccagccattgctcaccatcagtacggctacgtaaaacgatctgcccttcgtcagtaaaacgcagggcgttgctcaacaggttggtaatgacctgacgaatacgccgcggatcgcccattaacgcagtcggtacatcgtcggcaannnncgttgccaggcgaatcgggcgacctttcacccgtccactcattaattgcagggtactttccagcagcggtcgcggttcaaagggttcatcgctgaccgaaacattcttgccacctgcttcgatagcggaataatcgagaatatcgttgaggatggtcagcaacgattcgccggagtcggtaattgcccgcaaatcatcacgctgggcgttaagtgcggggttatctgccagtagctgtgcggtgccgagaataccgtacagcggtgtgcggatctcatggctcatcgccgccagaaacgccgattttgcctggctggctttttctgcttccgcccgtgcttgtcggtgttctatcaccagttcctgcaattcagctgtacgcgctttgacctgcgccgccagctgttcgcggtggcgattcagtgcatgaacactgctgcgaaacgcatccatcagccgcccgatggtgtccagctcccgtacgccagcggtttccgggaaaggggagtcaatatcaccgtccagcagccgttgcagcgcctgcgtttgttcggcaagtggacgcgtgactgagcgataaaccacgcgccagaggatcagaatcagtgcgcaaagtgaaacaatccccagcaataacaggctgtattgcccgcgtgcactggctttttccagatgcgccagtccgtgctgattacgcagctcaatggtgtcgaccagctgactgacttcgctgctaaactgcgcgaactgggcgatgttattttgtgcgagagtttgtaggtgattgctgatttcactgtcctgctggaacagcgccagcaaatcgctatattggctaacggtagttaacgttgttgcgacctgagcacgaactcccggatcttcaatgcgtatttgccgacgttgcagaattttcaccgcattattgagctgcttttccagcgttggcgcatttttctggatctgctccagccccagattcatcaccatttgctgcacccgcagagcgctaaggcgcagttcattcatctggttaacatactcaagatcgatatcaatcagccgatcgagtgcactttcagcagcctgacgctgatcttgttcgatcaaatcgtaaatcccggcctgggtcgctccggcggaggttgccgcattattcgcctgaccttgcgccaggcgtgcgatctcatcggcggcagcgactatctgctgactgagtcgctgttgttgctggcgcagttgcagacgccgccccaccagttccccttgctgacgtaacgaacgggagatctcctgctcctgttgttcaatagcggtggtatcaaaaccttgttcccgtaacgcttgcagcaacgcattaatcttcaggctttgtgcggtgagcattcgcccctgcgcctgccacatcttttcgttatcggcactggtcaggttctgcgcggcgaaaagttcccaggcgctggcttcgctcaactggcgcgccatattcatggtaggaatcaatgcctgagtattgtctttttccacctggctgataaagcgcaggttgtaccatcccaccagggtactggtcagggttaacagcgccatcagggcaaagcccatccagagtcttcgggtcagggttaaattcacggtcggtgcacttaaggtgaaaaatgttgagtcgcaaagcggaatgcatctagcataaagccttattattgatgaggctatcatgcgcgtgctgctatttttacttctttcccttttcatgttgccggcattttcggctgataacctgttgcgctggcatgatgcgcagcatttcacggtgcaagcctctatgccgctaaaagccaaacgcgtatggaaactgtgcgcgctttatcccagcctgaaagattcatattggttatcgttgaactatggtatgcaggaggctgctcgccgctacggtgtggatttaaaagtgctggaggcaggcggctacagccagttggctacccagcaagcacaaatcgaccagtgtaaacagtggggcgcagaggccattttgctcggtagtagcacgacgtcatttcccgatctgcaaaagcaagtagcaaatctgccggtgatcgagctggtaaatgctattgatgctccccaggtgaaaagccgcgttggtgtgccctggtttcagatgggctatcaacctgggcgatatctggtgcaatgggcgcacggtaaaccactgaatgtgctgttgatgcccggacccgataacgccgggggcagtaaggagatggtcgagggttttcgcgcagccattgccggaagcccggtgcgtattgttgatattgcgcttggtgataacgatattgaaatccagcgtaacctgttgcaggagatgctggaacgccatccagaaatcgacgtcgttgccggaacggccattgcggcagaggcggcaatgggggaagggcgtaacctgaaaacgccgcttaccgtggtgtcgttttatctttcacatcaggtgtatcgcgggctgaagcggggaagagtgattatggctgccagcgatcaaatggtctggcagggggaactggcagttgagcaggccatcaggcaattacaggggcaatcggtgtctgataatgtcagcccaccgattttagttctgacgccgaaaaatgccgaccgcgaacatatccgccgctcgctgtcgcctgggggatttcgtccggtctatttttatcagcacacatcagcggctaagaaataaccttcgccatgttgcgtcaccagtaaatccgcgctgagtttatggcgtaaacgacgaattaacacatcgacggtgcgcaggtcagggttttccacccgacgcgcagagagcatacgcagcagacgttcacggctgagaatttcgcccggattggtcacaaatgccaccaacatttcatactctgcgcgggtcagtttaatcggctcaccatcccgctccagcgtatggcgcgacacattcaggcaataacccgcaaagcgatagcagttgtcctgagtgtacggttgagcttgtcgcgcgaggtcgattcgccagagcagattttttacccgtactaccagttcgcgcagttccagcggtttggtgacgtaatcgtctgcgcccatttccagcccaacaatacggtcaatccgatcgctgcgtccggtaaccagaataatccccaccgttgagcgttctcgcagggcgcgggttaacatcaggccattttcatcgggcaagttgatatccagcagaattaaatccaccggctgattctgcataatttcccgtagcccggcaccgctcgccgtaacggaaacggtatacccctcctgagtgaagtaggattgtaatcgcgcctgggtaaccggctcatcttcaacaataacaatgtgatgtggcatcagagggttttactcattctgttcatatctgttcatattctgccgtaagccgttcatcctgaccagtgccgctgttcatatttactcattaagatcgcttcactaaaccataattttacaggggctattatgcggaaactctggaacgcgctacgccgacccagtgctcgttggtcggtactggcgctggtcgctattgggattgtgattggcattgcgctgattgtattgccacacgttgggatcaaagtcaccagcacaaccgaattttgtgtcagttgccacagtatgcaaccagtgtatgaagaatataaacagtcggtgcatttccagaacgcctccggcgtgcgagctgaatgccatgactgtcatatcccgccggatattccaggcatggtgaagcgcaaactggaagcgagcaacgatatctaccagacctttattgcccactccattgatacacctgaaaaatttgaagccaaacgcgcggaacttgccgagcgtgaatgggcgcgaatgaaagaaaacaactcggcaacctgtcgctcctgccataactacgatgcgatggatcatgcgaagcagcatcctgaagcggcacgtcagatgaaggtggcagcgaaagataatcaatcctgcatcgactgtcataaaggtattgcccaccagttaccggatatgagtagcggcttccgtaagcagttcgatgagctgcgcgccggtgctaatgacagtggtgacacgctgtactctattgatattaagccaatttatgcggcgaaaggcgataaagaagcctctggttctctgctgcctgcctcggaagtgaaagtccttaaacgtgacggcgactggctgcaaattgaaattaccggctggacagaaagcgccggacgtcagcgtgtactcacccaattcccaggtaaacgcatctttgttgcctcgattcgtggtgatgtgcagcagcaggtaaaaacgctggagaaaaccaccgttgccgacaccaataccgagtggagcaagttgcaggccaccgcgtggatgaagaaaggtgacatggtgaacgatatcaaaccgatctgggcttatgcggattcgttgtacaacggcacctgtaaccagtgccacggcgcaccggaaatctctcactttgacgctaacggctggattggcacgctcaacggcatgatcggctttaccagcctcgataaacgtgaagaacgcaccttgttgaaatatctgcaaatgaatgcgtctgacaccgcaggtaaggctcacggcgataagaaggaagaaaaataatgaacaatancgatctctttcaggcatcacgtcggcgttttctggcacaactcggcggcttaaccgtcgccgggatgctggggccgtcattgttaacgtcgcgccgtgcgactgcggcgcaagcggcgactgaggctgtcatctcganagagggcattcttaccgggtcgcactggggggctatccgcgcgacggtgaaggatggtcgctttgtggcggcaaaaccgttcgaactggataaatatccgtcgaaaatgattgccggattgccggatcatgtacacaacgcggcgcgtattcgttatccgatggtacgcgtggactggctgcgtaagcgccatctgagcgacacctcccagcgcggtgataaccgttttgtgcgtgtgagctgggatgaagccctcgacatgttctatgaagaactggaacgcgtacagaaaactcacgggccgagtgccttgctgaccgccagtggttggcaatcgacggggatgttccataacgcttcggggatgctggcgaaagctattgccttgcatggtaatagcgttggtacgggcggagattactctactggtgctgcgcaggtgatcctgccgcgcgtngtcggttcgatggaagtgtatgaacagcaaacctcctggccgctggtattgcagaacagcaaaaccattgtgctgtggggntccgatttgctgaaaaaccagcaagcgaactggtggtgcccggatcacgatgtttatgaatattacgcgcagttgaaagcgaaagtcgccgccggtgaaattgaggtcattagcatcgatccggttgttacatccacccatgagtatctggggcgcgagcatgtgaagcacattgcggttaacccgcaaactgacgtgccgctgcaactggcgctggcgcatacgctgtacagtgaaaacctgtacgacaaaaacttcctcgctaactactgtgtgggttttgagcagttcctgccgtatctgctgggtgagaaagacggtcagccgaaagatgccgcatgggctgaaaaactgaccggcattgatgccgaaaccattcgtggactggcgcggcagatggcggcgaacagaacgcagattattgctggctggtgcgtacagcgtatgcagcacggtgaacagtgggcgtggatgattgtggttctggcggcgatgctggggcaaattggcctgccaggtggtggctttggttttggctggcactataacggcgcaggcacgccggggcgtaaaggcgttattctgagtggtttctccggctctacgtcgattccgcctgttcacgacaacagtgattacaaaggctacagcagcaccattccgattgcccgttttatcgatgcgatcctcgaaccggggaaagtaatcaactggaacggtaaatcggtaaaactgccgccgctgaaaatgtgtatttttgccggaactaaccccttccatcgccatcagcagatcaaccgcattattgaaggctggcgcaagctggaaacggttatcgccatagataaccagtggacctcaacctgccgctttgccgatatcgtgctgcctgcgaccacgcagtttgagcgtaacgatctcgaccagtacggcaaccactccaaccgtggcattatcgccatgaaacaggtcgtgccgccgcagttcgaggcgcgcaacgactttgatattttccgcgagctgtgccgccgctttaatcgcgaagaagcctttaccgaagggctggacgaaatgggctggctgaaacgcatctggcaggaaggtgttcagcaaggcaaaggacgcggcgttcatttgccagcgtttgatgacttctggaataacaaagagtacgtcgagtttgaccatccgcagatgtttgttcgccaccaggcattccgcgaagatccagatctcgaaccgctgggcacgccgagtggcctgattgagatctattcgaaaaccatcgccgatatgaactacgacgattgtcaggggcatccgatgtggtttgagaaaatcgaacgctcccacggtgggcccggctcgcagacgtatccgttgcatctgcaatctgtgcatccggatttccgacttcactcgcagttatgtgagtcggaaactctgcgtcagcaatatacggtagcgggtaaagagccagtgttcattaacccgcaggatgccagcgcgcgcggtattcgtaacggtgatgtggtacgcgtctttaacgctcgcggtcaggtgttggcaggggcagtagtttctgaccgctatgcacccggcgtggcgcgaattcacnaaggggcatggtncgatccagataaaggcggcgagcctggtgcgctgtgcaaatacggtaaccccaacgtgttgaccattgacatcggtacttcgcagctggcgcaggcgaccagtgcgcacactacgctggtggaaattgagaagtacaacggaacagtggagcaggtaacggcgtttaacggccccgtggagatggtggcgcagtgcgaatatgttcccgcgtcgcaggtgaaattatgaccacgctgacagcacaacagatagcctgtgtttacgcctggctggcgcagttgttctcccgtgaactggacgatgaacaactgacgcaaatcgccagtgcgcagatggctgaatggttttcgttgctgaaaagcgaaccgccgctcactgcggcggtggatgagctggaaaaccgtgttgccactctgacagtacgtgacgatgcccgtctggaactggccgctgacttttgcggcctgtttctgatgactgacaaacaagcggcgctgccgtatgcatcggcctacaaacaggacgagcaagagattaaacgcttgttagttgaggcagggatggaaaccagcggcaatttcaacgaaccgacagatcatctggcgatctatctcgagttgttgagtcatctgcatttttcgctgggagaggggacggttcctgcgcgaagaatcgacagtttacggcaaaaaacactcacggcgttgcggcaatggttaccagagtttgttgcgcgttgccatcagtatgacagctttggtttttacgcggcactaagccagttattgctggtgttagttgagggcgaccaccaaaacagataacgtcgtttgttagcctgataagacgcgtttagcgtcgcatcaggcattagggcaccgccgccggatgcggcgtgaacacgccttatccggcccacaggaaaagtactctttgcaggcaggctaagatgcgtcatcacatccggcaaacacacatcacggatgagctacaaaccgggaaagccgctggcgcagcaggcggttttcctgcttcaggtgcgcaatatcatccattaacgtcagcgccaccgcgatccccggccagtccagagccagttcatgacgcaggcgcaccgcgcgttgcaccacgatggcggcatggtcgtcaaatacccnggttgtttcctggntctcacgcggttcaaccacccccaaaccgacaatttcattcaattcctcttcagagatgccggtatgcaggcaaaattcggtaatagtaaaagtcaccgtaacattagccattatgctttcccccaatctttacgtggatcaaaagacgactgggcgtctgccagttgctgccacagcgcggcagtgttttcatccggtttcggcggcatcacgattttcagtaccgcatacagatcgccggtctgttttttgctcaccagacctttgcctttaacgcgcaatcgttgcccggcctggctgccaggcgggatagtcagcaaaatgctttctttcagtgttggaacggtgactttagcacccagcgccgcttcccacgggctaaccggcaccacaatttccagatcctggccgacaatatcaaacagcggatgtggcgcaatatgaatcaccagccacaaatcgccatttggaccgccgttttcgcccggcgtcccctggcctttcaggcggatgcgttgaccattgccgacgcctgccgggatcttcacattcagcgttttcgggatttcctgttcgatcatgccaaaggcgttataaaccggcaggttatagctgatggtacgcttatgctcagtaagcgtttcttcgaggaataccgccacttcgatttcaatatcgtggccgcgtgcggcggggcgttgacggctctggcgggcatgctgaccgaaaattgacgagaagatatcgtcaaaatcttcggcgttaaaactctgaccgtcgccatgctgaaactgacggctaaattgcggatcgttgcgatgttgccacatctgatcatactcagcgcgacgttgttcatcacttaacacttcccaggcttcagcgacctctttgaagcgggcttcggcatccggttctttgctgacatcaggatggtatttgcgggcaagtcgacgataggcggtcttgattgtcttgagatcgtccgtcggtttcacgcccatgatggcgtaataatcctttaattccatagcgttatctcgcgtaaatcaacacaaattgaaggaacccctgtaaggtaactcctataagtgtagggtaatcctcaaaatttcatatgccaacacagaatatgttattgaaatcatcgcggagaggaggtcgcctcaaggtggggcgctgaacatattttaaacaggtgaaaaagggtgagcgatttttgatagttgaaacaggcactttaagttttactagngcgtcattatttattaaattttataggcgctatatatgggtaatatacatggaattagttgcactgcannnaattatttgaagcaagcctggaacgatataaaaaatgagtacgaaaaaaataaaacatattcaatcacnctttttgaaaacacactggtgtgttttatgcggttgtataaagaaatcagacgtcaacaagctgaagactacattccatgcctggaatgcgattcactagaaaaagaatttgaggaaatacagaatgataatgatttatcattatttatgaaaacattgcgtactaatgataaacaaatttattcagggggttcaggaggtattacatatactatacaanatgttgaagatgttgatattgttagagtatccttgccgggtagaggttcagagtctatcacagattttaaaggttattattggtatggctttatggaatatattgaaaacattaatgcgtgtgatgatgtttattctgattattgttttgataatgatgaaaatatgagtatccagccagaatggataaatacgccgggaatatctgatttagattctggtattgatttgtctggtatatcttttattcagagtgaaattaataaaacttatggattaaaatacgctccagtagatggcgatggctattgtctgttaagggccatactggttttaaaagaacatgagtattcatgggcgctgggcagccataagacgcaaaagcaagtatacgaagagtttattaaaattgttgataaacaaacgatcgaggctcttgttgatacggcattctataatctcagggaagatgtaaagacgttatttggcgttgatctacaatctgacaacaaaattcaggggcagggtagtcttatgtcatggaactttctgtttttnnaaaaaagaatttattgatagttgcttgaatgacaaaaaatgcatactgcatttacccgagtttatatttaatgataacaaggcgcgccttgttttagacaccgacccagagaagaggattaatgaggtgaaaaatttcctcactgctctttcagatagcatttgctcattatttattgttaatagtaatgtggcatcaatctccttagggaatgaatccttttcaacagatgaagatcttgagtatggttatttaataaacactggcaatcattatgacgtttacctccctcctgaactttttgctcaggcttacgagttaaacaataaggaaaggaatgcgcaaattgnttttttaactcgttatgcaatttaatgacagaggcatatgctaaaaaccattgttattagtctcacacttttttattggtaaatattgcctctgtattggtaacgccgccgatattctgtttagccacaggtgcaatcatcagcggcgtacgcgaggcaggggctaatcaggcatagtttgcgtcaaaccttgcctgtttttaaagatgaatataaaaacagccgttcaacaagccattttgcgaacctgttcccggaaaaaagtcatatttctgtcacactctttagtgattgataacaaaagaggtgccaggaatgaacaaaacgctaatcgccgcagctgtggcaggggtagttttactcgcttcaaacgctcaggcacaaaccgtaccggaaggctatcagctacagcaagtgctcatgatgagccgccataacttacgtgcgccgctggcgaacaatggcagtgtgntggagcagtcgacgccgaataaatggcccgaatgggacgtccccggtgggcaactcaccaccaaaggtggcgtactcgaagtgtatatgggccattacatgcgtgaatggctggcagagcaggggatggtaaaatcgggggaatgcccgccgccggacaccgtttatgcctatgccaatagtctgcaacgtaccgttgcgaccgcacagttctttattaccggcgcattcccggggtgtgatattcctgtgcatcaccaggaaaaaatgggcactatggacccaacctttaacccggtgatcaccgatgattccgccgcattcagtgaacaggcggtggcggcaatggagaaagagctcagcaaactccagcttaccgacagctaccagctactggaaaaaatcgttaactataaagattcccctgcctgtaaagagaaacaacagtgttcgctggtggatggcaaaaatacctttagcgccaagtatcaacaagaaccaggtgtttccgggccgctgaaagtcggcaactcgctggtagatgcgtttactttgcaatactacgaaggttttccgatggatcaggtggcctggggagaaatcaaatctgaccagcagtggaaggtgttgtcgaagctgaaaaacggttaccaggacagcctgtttacctcaccggaagtggcgcgcaatgttgcgaaaccgctggtcagttatatcgacaaagccctggtcaccgatcgcaccagtgctccaaaaatcacggtgttagttgggcatgactccaacattgcctctctgttaacggcgctggatttcaaaccgtatcagttgcatgaccagaacgaacgcacgccgattggcggcaaaatcgttttccagcgttggcgtgacagcaaagccaatcgcgatttgatgaaaattgaatatgtgtaccagagtgcggaacagttacgtaatgccgatgcgttaaccctgcaggcacctgcgcagcgcgtgacgctggaattaagcggttgcccgatagacgctgatggtttctgcccgatggataagtttgatagcgtgttgaatgaagcggtgaaataacagaaaactcccccgttcgctacgggggagtcgctggttaaacgtttttacgttcgatggtctgttcgccccaaaaaagcgaatctttgtcggtcttagcaaaggctttgactaacacttcatcgctaccttcttcccaaatcttttccgccatttnttcgtcgtacccggcgacttcgaaaatggcctcggctatttccggcgacgtattgcgcagagatgcccattcaccgacgtgatgagctttcgcttcttgagttggcatgcgtatcctcctgttgaagattagccattaagtttaactgccagacctgcgacatattccccttgataacgagcaatagacagttcttcctggctgggctggcgtgaaccgtcaccgcctgcgatggtggttgcgccgtannnnntaccgccgcgaacctgtgaaacgtcaaataattcctgcgctgcgtagccaatggggacaatcaccatgccgtgatgcgcaagggtcgtccaggtggatgtgatggtttgttcctgaccgccgccagtaccggtggaactaaagacgctcgccagttttccgtatagtgcgccggnagcccacaggccgcccgtctggtcgaggaaggtacgcatttgaccggacatgttgccaaagcgggtaggtgtaccaaaaataatggcgtcgtaatnggccagttcttgcggggttgcaaccggtgcagtttgcgttttaccgcctgctttttcaaataattgcggcgacatggtttccggtacacgcttaacgacaacttcagcgccatccactttgcttgcaccctcagcgactgcgcgtgccatcgtttcaatatgtccgtacatggaataataaagcaccagaactttagccatttctaaccactcctcgtgttatctctattccgtagcgattcgctaccacttatttaaagataagacgtccttttcagagtgcaaatttcacaaccacttatttgatttataacaactttcacaagcacgcaattttgtnnnnnnnnnncacatttttatctcatcgcgtttttttaatcataagagcggcttatggataattattggagatgatatctattctcgctaagaagctgttgcaggatattaccaaacgcgggtagaaacacgtcagttcactaagcttagtcccacgtagcgaaaatatggcagccgccatacgccgcgttaattctatgcaatatgatgtctatacccagacggaggtcagtaatggcaaaccatcgaggcggttccggcaattttgcagaagaccgcgaaagagcatcagaagcaggtaaaaaaggtggacagcacagcgggggtaatttcaagaatgacccgcagcgcgcatctgaagcaggtaaaaaaggtggcaagagcagtcacggcaaaagcgacaactagccgggctaatcaatgacgaatgcatttttttcttaagctcgtcaaaaagccatcaccgcnngtaaccccggcggttttctgtttatggctcctgatgaacaacttctggcggtggaacgtcaaccaaccttctgcttaataacgcattgagtaaaatcgcgccaaaggttgctgtaccgattcctcccaacgtaaaaccgcccagcgtgagagcaaaatcacccgcgcccagcactaaggttactgcgaccataatcaaattaccgttctggcttaaatcgacacggttttgtacccatatccttgcgcctgcgacggcaatcagcccgaacacaacaattgatgcaccaccaatcaccgcggccggaatggtatgaatcagcgcgccaaatttcggtgaaaagcccaacagcatggcgatgacggcagcagcaacaaacaccagcgtcgagtagacttttgtcacggccatcacaccgatattttcagcataggtggtgacgccgctactgccgacagaaccagaaagcatcgttgccagaccatcgcctacgaatgctcgccccatatacgggtccatattgcgtccggtcatcccggcgaccgccttgagatgacctaagttttccgccaccagaatcaccgccacgggcgcaatcagcatcattgcctgaccattaaaagcaggagtggaaaaatgtggcagaccgaaccaggcagcatggctgacgagagtaaaatcgacggcttttcccagccctaaaacgttggtcatcacgccatacagcagacaggcgacaattaatcctacaagaatcaataaccgctggatcatgccacgggtaaacaccgccaccagcccaatacacagcaccgtcattaccgccatccagctatcaaagcctgaagccgatacactttttaccgcgataggcgctaagttcaggccaatcgccatcaccaccgcacccgtcaccaccggcggcattagccgttcaatccagcgcgtaccgattttcatcaccaccaggccaatgacggtataaaccagcccacaggcgataatcccgcccagcgcaatgctgatattcgggttaatgccctgaccgttaaagcccgttgnggcgatcaccacgccgacaaaagccgcgctggagccgagataactgggcacgcgcccgccggtaataaagaaaaacagtaacgtgccgatccctgacattaaaatggaaagattgggatccagccccatcagaatcggcattaacaccgtcgcgccaaacatcgccaccgcgtgttgaacgcccattactgccgtctgagcaaacggcaatcgttcatccggcgcgaccacgccgctctctgtagaggtcgattttaactgccagtgaggaagaccgaacattgccatcagctgtctccttnaggaggttaacaagcagggcgcatcagcgcgtgataactgcgatcgaaccacaccagcccgtagggggtggcgtgacgatgaatcgcttcgatggcgcaaaacaaaatgtcgtgggtgccgacgctcaccacctggctgatacggcagtcaaacgaaaccagcgcctcttccagttgcgggcatccggtcacaccagtctgccagcgggcggcggcaaagcggtgttccatgggcgttttgccgccaaaaaggtttgaaagcggctcctgcccggcgctaagtgtatttacacacagcgttcgattttcattgaataccggccagacggacgccccacgattcaggcacaccagtaatgtgggaggcgtgtcggtcacgctgcagacggcgctggcggtgaacccnnnnnnnccggctggaccgtccgtggtgatgatattgaccgccgcgcccatgcaggacatcgcatcgcgaaaagtttgttgatcgacaatgttcatagtttgctccttacaacagcccgcaggcttcttcaaaggacagacgtggcaggcgcgcaaaaagtttgctgctatcgccatagccgatattaatcagcagattgctcttcagcgtgctgcctgcaaaaaaagcgtcgtctacgtgttgacgatcaaaacccgacatcgggccggtatccagccccagcgcacggcaggcgatgatcagataagccgcctgcatggaactgttgcgaaacgctgcttcttcggcaagttgtgggctggaggtaaaccaactgcgggcatcgccgtgaggaaacagttgcggtaaccgttcataaaattcactgtcccatgcgacgatagcggtgacgggcgcggtcagggttttttgcagattgccgctggaaagcgccgggcgcagacgttcttttccctctgcagtgcggataaacacgatacgtgccggagaacagttagctgatgtcggcccccatttcatcagggcataaagctcccgtaacgtctcatcgctgacgggtgtctcccgccagccgttgtgagtgcgggcatcggtgaacagggtgctaagcgcacctgggctaacggcttcgttcatagcaattccttacagggcggcttcacggtgatgtaacaggctggcaagcccgttgagtaacagagcattaaacgtttcgggatcggtcacgttgcaggcgtgtccgccatagcgcatcaccattttctggctatcgggcagggcggcatgaagttcactggaacatgctgatggcaccagcagatcatcactggcgcagatgatttgcaccgggcagcggatgcgatccgcatggtgactaaagtcagcgcgtttgagggcgttaagtcgacgcagtaaattatttttgccctgaaaatgcgccagtgccagcgcgtcttctgcctcaaggcgaggtgcgcgggccgccatccagtcggcgggatagaggaacaacggctgcgcttccacccatgcctgcgcgccaccgctatacagtaatcgttcgnnnncnnnnaaacagcggcgcgtatgggcgtttattcgtagccagccgttaacgcagaccagcacagttaccgacgcgggatgatccagcgccagctgcattcccaccagcgcaccgagcgcatggccgaccactgcgtaatgctcaatccctgcggctaccagcgcctgatgcagttccgctgccatctgggtgatactgtaatcttctgccagcgtgtcgggattattgccggtgccgcgctggtcgtaacagactacctgatactcctgctccagcaccgccagttgcggtaaccagtaactgccgctaccgccaagacccgaaatcaacaccactacgggcgcatcagcataagggggaggtgagagtgaaagtttcatcgcggcctcacttggcgatatgcgcaattgtggcgatttccaccagcgcgtcaggttttaccagtccgcactgaatgcagaatcgcgccggtttatcacctggaaaaaactcggcgtaggtttcgttaatcgcggcgtaatttttccagtcggtaataaagatgctgttgaaggtcacatccgccatcgtgccacccgctgtctcgattaccttgcggatagtttccagaacgtggcgggtttgcgcctttgggtcatcggcaaacagcacgttattgtgttgatcaaaagccagcgtaccggagacatacaccacgccatcagccagcgtgccgggaacgaagggggccagcggtgcgctgctgccagcgggaataattacggattttggcatcgttaaactccttaagcgatacgagcaaaggacgtgggagaaagcgcgtcgcagaacgtttcgacgtcgctgacccagccaaaaaaggtttcgatattgaacaacgcggctttctgtacaaattccggccccgcctggtgtgttgcgtcttccagcaccacgccgaaatactccagaaaaaagccatcgcgtagcgtcgattcgacgcagacgttggtagcgatgccggtgaaaaccagatggcgtattccgcggctgcgcaaaatgctgtccagcggcgtattgaagaaaccgctgtagcgcggcttcggcagcacaatatcgccaggctgcggcaccagttcatccaccagttgataatcccaggagcctttcgccagcaatttcccctgcagctgcggctgtttacgcatggttttcagggcgttcgatttatgaaaattcggtgagccagggccgccagcctcgacatactgttcatcccagccattttgaaaccagatgatcaacatccctgccgctcgcgctgcggtcacggcggtttgaatgttggcaatgaccgggcgagtggttgagacatcaaacccggcgagatctaagtagccgcctggcgtggcataggcgttttgcatatccaccacgatcagcgcactttgctgcggatcgaaggtaatggcttccggtcgagcggttaatgtcgtcatcatgccacctcctgagtcagcacagggagatgggcgcggcactgcatcagtggttgaatgcgctcgccgaaggtttcgattcccgacagaaaatcgtcgaaggttaacagcacgccttcggcaccaggcacgcttgcgacttcatctaacatgcgcgcgacactggcgtaagaaccgactaacgtccccatattgatgtttaccgccgaagtgggatcggccatctgacggacgttggtgtcagtaccggagcgggtatctttctgactttgttcggttagccagcttaacgcctcttcatccgcgcccgctttgtagtgttcccatttggcgcgagcggcatcgtcggtttcatcggcaatcaccataaacaatacataagagccaacgtcgcgcccggtttgctctgcggcctgtttcatccgnncagcggtcggggcgaaagccgtgggtgtatttacgcctttgccgaaacagaagttgaaatcggcatactgagcggagaacgccatgccagcgtcgctttgcccggcgcagatcactttcatggggacactcggttgcggactgacgcgacaatcattcatggtgaaaaaatcgcctttaaaatcgctttttcccgtgccccacaggtcgcgcagcacctgaacatactcggtgagatagtcgtaacgacgggagaaatagtcatcgccaggccagatacccatctgctcatactcgggcttttgccagccagtcacgaggttgacgccaaaacgcccgccagagatggagtcgatggttgcggccatacgggcgacgattgccggaggtaacgttaaggtggcggcggtggcgtaaatctgaatgcgcgaggtcacggccgccagccccgccatcaaggtgaacgactcaaggttgtgatcccagaactcagttttgccgccaaagccacgcagtttgatcatcgacagggcgaaatcgaaatggtagtgctccgctttttgcacgatggctttattcagttcaaaggtcggcatgtactgcggcgcgtgggtcgaaatgagccagccgttgttgccaataggtacgaatacgccaattttcatcatcaacctctnttcgtctcgtaaagtgaaagtcagacggggcgctgcatcctgcatatccttttcagccgcgtattggcttgtttgcaaagcggatgccagtttttaaaaagggagtgttattaatgtgttaacatcgcgttatctaaaatgtctggtaaaaagtggactaaacggtcaaaacagttgcacataaaacatgcatctgtgcgcgatgagagtgcanaaggtcgaggccgggcgggggttttgctatcctgttgccaatctacaagaggggagagcgcatgacgcaaggcgcagtgaaaacaacgggtaaacgttcgcgcgcagtaagcgcgaagaaaaaagcgattcttagcgcagcactggacactttttcacaattcggttttcacggcacacggctggagcaaattgcagagttggcgggtgtttcaaaaaccaatctgctgtattactttccgtcaaaagaggcgctgtatattgccgtgctgcggcagattctcgatatctggctggcaccgttaaaagcgtttcgtgaagatttcgccccgctggcggcgatcaaagagtacatccgtctgaagctggaagtctcacgcgattatccgcaggcttcgcgcctgttctgtatggagatgctggcaggcgngccgctgttaatggatgaactgacgggcgatttgaagtcattaattgatgagaaatcggcgctgattgccggttgggtcaaaagcggcaaactcgcgccgattgatccgcagcatttgatttttatgatttgggcttccactcaacattacgccgatttcgcccctcaggtggaggcggtgacaggcgcaacgttgcgcgatgaggtatttttcaatcaaacggttgaaaacgtgcagcggattattattgaggggattcgaccacgctaatgatgccggaggagggtgtaacatcctccggctacctgtttaaccgatcgtcattaagctggcgttaccgccagcggcagcggtattcacactcagcgaacgctcgatatacagccgttccagcaggatattgctttcgccacgggcaaaaccctgcaccgaaacaattgcgccatcccgcgcggcaactgcttcacacaatgcgcgaagctgatccgaatcaccgtggaagatcaccgcatcaaacggttgagcggtaatattttccgctttcgccagttgaatacgctcgctgacagtcgatggcaatgccttcactaactgacgatgcagcgcgtcatctggccacagcacctggctgcccaccgccagcacggcggcgagctgagtcagcgcatcctgttcatcatccgcgatacacaatacgcgctcacgcggcagcagcgtccaggtgttgcgctcacccgtcggccctggcagcaatcgttgtgttcctgcctgcgccagctcgccatattgcgtacataacgcctgcaattctggacgatttgctgcccattcccgcagtgcatttagcggctgagtcaatgcggctttcaactgcgcatcgaccggatactctgcatcctgacgcgcgagtgtcaccgccagcgcactttccgggcgattcgccagcagacggtagagatagagcggaccgcctgctttcggcccggtaccggacaacccttcgccgccgaatggctgcaccccaaccactgcgcccaccatattacggttaacatacaggttaccaacatgggctgagccagtgacctgggcgatggtttcatcaatacgcgtatgaacgccaagcgtcagaccatagccggaagcgttaatctgctcgatcagctccggcagctgattacggttataacgcaccacatgcagcaccggaccaaagacctctttttgcaattcggcaaagtcatccagttcgatcagcgtcggggcgacaaaggtgccgctttgccattcacgggcatcttcgctgttttcccgcaccgcctggaacaccggacggcctttgctacgcatggtctgaatatggcgctcaatattggctttcgcttcgctatcaatcaccggaccgatatcggtggtcagacgacccggattacccatccggcattcggccattgcgccgcgcagcattttcaacgtgtggtcggcaatctcatcttgcaggcacagcacgcgcagcgccgaacaacgctgacccgcactgtcgaacgccgaggccagcacatctattacgacttgttcggtcagtgctgaagaatcgacaatcatcgcgttcatgccgccggtttcagcgatgagcggaatagggcgaccctgagcgtcgaggcggctggcgatattgcgctgcagtaacgtagcgacttcggttgaaccggtaaacatcaccccgcgtacgcgatcatcacccgtcagttgcgcgcccacggtttcaccccgacctggcagcaattgcaccacgcctggcggtacgcccgcttccagcaaaatggcgatcccttgcgcggcaatcagtggcgtttgttctgccggttttgccagtacgctgttacctgccgccagtgcggcagcgatctgcccggtgaaaatcgccagcgggaagttccacgggctgatacataccacaggccctaatggacgatgggtttcgttagcgaaatcatcccgcacctgtccggcgtagtagtggagaaaatcgaccgcttcacgcacttcggcaatggcgttactgaaggtttttccggcttcacgcaccagaataccaatcagttgctgcatctggctttccatcagcacggcagcgcgatgcaaaatcgccgcgcgttcagccggaggagtggcaaaccagattggcgcgttattaaccgcactttccagcgcctgctctacttcacgcggcgtggcttcacgtacatagcccacaatatctttcggttccgccgggttaataacgggcgacatctcacctgccgctaccggttgttccagcattggcaaggcctgccatttttgcagtgcactattgagcagggcagaagagagggatgccagacggtgttcgttagcgagatccagccctgccgagttgtcgcgcccgtgaccgtaaagatcgcgcggcaggggaattttcggatgcggtaatccagtttgcccttcctgttgtgccagtttttctacagcagtgaccggatcggcgaccagttcatccagtggcaaagaggtatcggcaatacggttaacaaacgaggtgttagcaccgttttccagcaggcggcgcaccagatacgccagcagcgtttcatgtgtgccgaccggggcataaatacgacacggacggttaagtttgccgtcggcaactttcccggtgacctgctcatacagcggctcgcccataccatgcaggcactggaactcgtactgacccggatagtagttctgacctgccagttgataaatcgccgccagcgtgtgggcgttgtgcgttgcgaactgcgggtagattagattcggcaccgccagcagctttttcgcacaggcgagataagaaacgtcggtatataccttgcgggtataaaccggataaccttcaaggccgtccatcnnnncgcgcttgatttcactatcccagtacgcgcctttcaccaggcgaatcataagacggcgacggctgcgggtggcgagatcaatcaggtaatcaatcaccagcgggcagcgtttttgataagcctgaataacaaaaccgatgccgttccagcctgccagctctggctcgaaacagagtttttccagcagatcgagggagatctccagacgatcggcctcttcggcgtcaatgttgataccaatatcgtactgacgcgccagcagggtgagtgatttcagacgcgggtaaagctcttccattacccggtcatactgggcgcggctgtaacgcggatgcagcgccgacagcttgattgaaatgcccggaccttcatagatgccacgaccgttagacgctttaccaatggcgtgaatcgcctgctgataggaaaccatgtacgcctgtgcgtctgcggcagtcagtgcagcttcgccgagcatatcgtaagagtaacggaaacctttctcttccagcttgcgggcattggctaacgcttccgcgatggtttcgcccgtgacgaactgctcgcccatcaggcgcattgccatatccacacctttgcggatcagcggttcaccgctcttaccgataatgcggttcagcgagcgggagaggctggcttcgttatgggtggaaaccagtttgccagtaaacaacagcccccaggtagcggcattaacaaacagtgacgggctacgaccaatgtgtgactgccagttaccgttgctgattttgtcgcgaattaacgcatcacgggtggctttgtcgggaatacncaacaacgcttctgccagacacatcagcgccacgccttcctgcgatgacagcgaaaactcctgcaataacccctggaccatacctgcgcggccactggcatttttttgattacgcagtttatcggccagttgatacgccagtttgtgtgcctgttcagcaactggttgcggcaggcgggcttgttccagcagcatagaaaccgcttcggtttccgggcggcgataggccgcggtgatcgcagcgcgggaaaccgactggggcaaaatttgctcggcaaagtcgaggaatggctggtgtggttcctctgccggagtcggtgcttcatcgctctcattggcagcgccagaaagcagcacaggtagctctggcagagtatcgctgttttccagttgttcgagataagaaaaaatcgcctgcttaattaaccagtgtggcgtgcgatcgatacgtgtcgcggcagacttaatacgctcacgcgtcgcgtcgtccagcttaacccccatggtggtggttcccatgccattactcctgttgttctgaaaggtgcaacttaacgttatcgtgaaatatccatgatgttgcaactttgtgcaaccatgttaaatgtgacctgcgtagcaagcttaaaaatgaatgaaatgttaataaaagaaatcgatatgacagggattaaaaaaataactcagactttttctctgcggcagttaacatttttgaaaggtgcaaccgcaaaaaatgtgagagagtgcaacctgatgaaaaatagtgtcgctgagcactaaaatttaatgtaaatggtgtgttaaatcgattgtgaataaccagcgcttccggcaggatacggtcgccctggtaaaacataaactctgttaccccgttccggtggcagatataacggcaagtttcgacattgccgataataattttttggagactttagatggctattagcacaccgatgttggtgacattttgtgtctatatctttggcatgatattgattgggtttatcgcctggcgatcaacgaaaaactttgacgactatattctgggcggacgtagccttgggccattcgtgacggcattatcggcgggtgcatcggatatgagcggctggctgttaatggggttgccgggcgcggtttttctttccgggatttccgaaagttggatcgccattggcctgacattaggcgcgtggattaactggaagctggtggccgggcggttgcgtgtgcataccgaatacaacaataacgccttaacattaccggattatttcaccgggcgttttgaagataaaagccgcattttgcgcattatctccgcgctggtgattttgctgttcttcaccatttattgcgcttcgggcattgtggcaggcgcgcgtctgtttgaaagtacctttggcatgagctacgaaacggctctgtgggcgggagctgcggcgacgatcctttacacctttattggcggtttcctcgcggtgagctggactgacactgtacaggccagcctgatgatttttgccctgatcctgacgccggttatcgtcattatcagtgtcggtggctttggtgactcgctggaagtgatcaaacaaaagagcatcgaaaacgtggatatgctcaaagggctgaactttgtcgccattatctcgctgatggggtgggggctgggttacttcgggcagccgcacatcctggcgcgttttatggcggcggattctcaccacagcatcgtccatgcgcgtcgtatcagtatgacctggatgatcctctgcctggcaggggcggtggctgtcggcttctttggtatcgcttactttaacgagcacccgtcggtagctggtgcggtaaaccagaacgccgagcgcgtgtttatcgaactggcgcaaattctgtttaacccgtggattgctgggattctgctgtcggcgattctggcggcggtaatgtcaacgttaagttgccagctgctggtatgttccagtgcgattaccgaagatttgtacaaagcgtttctgcgtaaacatgccagccagaaagaactggtgtgggtagggcgtgtgatggtgctggtggtggcgctggtggcgattgcgttggcagcgaacccggaaaaccgcgtgctgggcttagtgagctacgcgtgggcaggctttggcgcggcgtttggtccggtggtgctgttttcggtgatgtggtcacgcatgacgcgcaacggtgcgctggcggggatgatcatcggtgcgctgacggtgatcgtctggaaacagttcggctggctgggactgtacgaaattattccgggctttatctttggcagtattgggattgtagtgtttagtttgctgggtaaagcgccgtcagcggcgatgcaaaaacgctttgccgaggccgatgcgcactatcattcggctccgccgtcacggttgcaggaaggctaagctgaagagtaattagttatcttttgctttttaacccgaatgttccctgccatgcggtataagttgcctggcagggagtgttcgggggcaattgctatttgcccacccggcacagatgaacaaaattgccgctatcggtaccttcagcttatgtcctgcggctggttggttgggcgagatagaatggattcgacatattcccgctgttttttaaccacgccagttttctcgcaccttgcttggtcactccgctcgatttcaggtaggatctggcagtagaccactggaagccgcgttttttactccacttttcggctccccctgcgctgttacgctcctcctgggtcatattcgcccattgtacgatgtctccgaaggtgaacgtgacccatttctgcggccctgtcagcttcaactcacccagggcggtaagcccgtcgttcttcaggtaattcctggcagtagttggcgcgaggtttctttccttacaccacttttctaaataaccaaccggttttcgcacatgcttgtttaaggctgcccactggcggatatgttcaagggtgaatttggcatattcatgcggcctgtttacctttacctgtcccgcgtagttcaggccgtgatcggtcaggtaatttctggcatttttgatattaaaatgattgcgcgtacaccatcctgaaactccctgtagagcgtttcgcgcctgctggtccatagccgcccattttcgcatgtcgtctacagtcaatttaacatattgctgtggctcgtccgcctctggctggtcctcgatggtctgcctggtgttgtttatgtcgtcatttgcagcatttggtgggatgttgcttgtattacacgattgctgtaattccacatcgttacgccacgccagcggagacatatttccaaattctcgcatgccattgttggtaaagtgtgtttcttctcttccgtattgctgggccggggagtagcgagctgcttcatgcaccctgttttgactttcatccgtgagtattggccgtacggaccagagatcaaaggttccatattgactgcgtgacatcagggttgtgacaatggagtgaaacagctcaagagtaatatttgtactggtgcacacaccgctcttgctgactgcaattttcatgagattgcccgtgttgtcatgctcttgcgtcttcgtgaaggtgatggtgaaaccggcaacatcgaaggtgaacggttcaggaagttgcagatcatttgcacttaccaccggttggaactgatgtcgatgcagttcggttgtcatcgcagcagccagcaagtgaacctcttcaggaaccagtggagctacagccatgcccgtgctgtagtccgcatcccttttgatataattattcatctgcaccagaagcgtcaaagtttccagacaactactcgggagttgttgcggtggaatatannntgctgcgctcgtattgaggttggatattggtctcatgtaatgctctccgtatccttacagggttaatgattcgtattaagtcgtagccatccgcatggctccgggcgattcagtcgccgcaccaggatgtacacttcggatgcgttcttgatgtagtaaacaatccgctcattctggtgttaatggaaacacccgtaaaaagcaggaggaatgccagttattggcgaatttacaatgctgccatcggggtgagtttcatgaagattattattttttttacgccttttatcatcgcgttaaataataatttcttcctgtgtttcataaagtatatagttacaattactcgtgaattttatcgataactcgacgttagccttcagccagagaaaaattaactcgcaaattttttaatttatcgttaggggaatgggtaaattatattctcgaccctaattacagggttcatctgaaagcagtggcgtctcatcttattacttctctttctgtattcatgctagtgggtttgtgataatgtcatagtagaaaaatcgtgagaaaaaagccctgaacaattattaaattattgatttttgtgtgttggtgtttttggtgattgattttcacgatgatctattacttctggttaagatttctatttttattatgtgtgactttattaatgcgcatcctgcttcgttttatcgtgatttagaattgtatgtagcattagccataaaatgatatcactgggaatataataaggggaattataattttgggggataattaggcactatcaaaaatcgctcattccagacttaaatacacgttttctcctgtttaggttgtgggcaaaaaattcgatgaggagatgaggtataatttcattcacaaccttatcactatctattaataagcaaaaaacaacgttcttttgtgaaacgactaactgaaaattcaacccttcgggcacgctgcagcgagtttgtcgccaccaacattcgtacaagcttcatctgccgggcgaaacgtcagctaaataccttaaaataatcgcttttttctccggatttgatctcctcatttttacattccaacatcattttataaatattccgcttgtatttttctttagcgtaatgataatcgctatcactacgatttacttttctttgcatagattgactcagaaaaacgtttaagggtgggtggcatgtttgttccgtttctcattatgttgcgcgaaggacttgaagccgcgctgattgtcagtttgattgccagctatcttaagcgtacccagcgaggccgatggattggtgtgatgtggattggcgtgttgcttgccgctgcgttgtgcctgggcttggggatcttcattaacgaaaccaccggcgaatttccgcaaaaagagcaggaactgtttgaaggtatcgtggcggtgatcgccgtggtgatccttacctggatggttttctggatgcgcaaagtgtcgcgcaacgtcaaagtacaactggagcaggctgtcgatagcgcattgcagcgtggaaatcatcatggctgggcgctggtgatgatggtcttttttgccgttgcaagggaagggctggagtcggtctttttcctgctggcggcatttcaacaagatgtcgggatctggccgccgctgggtgcaatgctcggtcttgctactgccgtggtgctaggcttcctgctctactggggcggtattcgcctcaatcttggtgcattttttaaatggaccagcctgtttattctcttcgtcgccgcagggctggcagctggtgccattcgcgcatttcatgaagccggattgtggaaccactttcaggaaatcgccttcgatatgagtgcggtgctctcaactcactcgctgtttggcacgctgatggaagggatttttggctatcaggaagcgccgagcgtcagcgaagtcgccgtctggtttatttatctcatcccggcgctggtggcatttgctctgccaccacgcgcaggggcgacagcgtctcgctccgcgtaacaaatacgacgcaaactcttgcttagttacaacatactttaaagggatagtctcgtcatgaccattaacttccgccgtaacgcattgcagttgagcgtggctgcgctgttttcttctgcttttatggctaacgccgctgatgtgccgcaggtcaaagtgaccgtgacggataagcagtgcgaaccgatgaccattacggttaacgccgggaaaacacagttcattattcagaaccacagccagaaggcgctggaatgggagatcctcaaaggcgtgatggtggtggaagagcgggaaaatatcgcccctggctttagccagaaaatgacggcgaatttacagcctggcgaatacgatatgacctgcggtctgctgactaacccgaaagggaagttgatcgtcaaaggtgaggcaacggcggatgcggcgcaaagtgatgcgctgttaagtcttggtggtgcaattactgcatataaagcgtatgtcatggcggaaaccacacagctggtgaccgacaccaaagcctttaccgacgcgattaaagcaggcgatatcgaaaaagcgaaagcactgtatgcgccgacgcgccagcactatgagcgcattgaaccgattgctgaactgttctccgatctggatggcagcattgacgcccgtgaagatgattacgagcaaaaagccgctgatccaaaattcaccggtttccaccgtctggaaaaagcattgtttggcgacaacaccaccaaaggcatggatcagtacgctgaccagctttataccgatgtggtcgatttgcaaaaacgcatcagtgaactggctttcccaccttcaaaagtggtcggcggtgcagccggactgattgaggaagtggcagccagcaaaatcagcggtgaagaagatcgctacagccacaccgatctgtgggatttccaggctaacgttgaaggctcgcagaaaattgtcgatctgctgcgtccacaactgcaaaaagctaacccggaactgttggcaaaagtcgatgccaacnnnnnnnnnnnngataccattctggcgaaataccgtactaaagacggttttgaaacctacgacaaattgaccgatgccgaccggaatgcactgaaaggaccgattactgcgctggcggaagatctggcgcaacttcgcggtgtgctgggattggattaagcattatgcagtatgaagataaaaacggcgtgaatgaaccgtcacgccgacgtttactgaaaggcattggtgcgctggcgctggcgggaagttgtccggtcgctcatgcacaaaaaacgcaaagtgcgccgggtacgctttcaccggttgcacgcaatgagaaacagccgttttatggtgagcatcaggcagggatcctgacgccacaacaggccgcaatgatgctggtggcgtttgatgtgcttgccagcgataaagccgatcttgaacggttgtttcgcttgttgactcagcgttttgcttttctgactcagggcggagcggcaccagaaacgccaaatccgcgcctgccaccactcgattccggcattcttggcggctacattgcgcccgataatctcaccatcacgttatcggtgggtcactcattgtttgatgagcgctttggccttgcgccacagatgccgaaaaagttgcagaagatgacgcgttttcccaacgactcgctggatgcggcgttatgtcatggtgatgtgttgctacaaatttgcgccaacacccaggacacggtgatccatgcactgcgcgatatcatcaaacatacgccggatttgctcagcgtgcgctggaagcgggaagggtttatttccgatcacgcggcgcgtagtaaaggcaaagagacgccgattaatttgctgggtttcaaagacggcactgccaatcccgatagccagaatgataagttgatgcaaaaagtggtgtgggtaacggcagatcagcaggagcctgcgtggacaatcggtggcagctatcaggcagtacgcttgattcagtttcgagtggaattttgggacagaacgccgctgaaagaacagcagacgatttttggccgtgataagcaaaccggtgcgccgctgggaatgcagcatgagcatgatgtgcctgattacgccagcgacccggaagggaaggtgattgcgctggacagccatatccggctggcgaatccccgcacggcggagagtgagtccagcctgatgctgcgtcgtggctacagttattcactgggcgtcaccaactccgggcaactggatatggggctactgtttgtctgttaccaacacgatctggaaaaaggcttcctgacagtacaaaaaaggctcaatggcgaagcgctggaggaatacgttaaacctatcggcggcggttatttttttgcgctgccgggagtgaaggacgcgaacgattatctcggaagcgcgttattgcgggtttaatgtttttagacggataaggcgttcacgccgcatacggcgatcgtgcactgatgcctgatgcaaatcctgctgaaagcacacagcttttttcatatctgtcatcactctgtcatctttccagtagaaactaatgtcactgaaatggtgttttatagttaaatataagtaaatatattgttgcaataaatgcgagatctgttgtacttattaagtagcagcggaagttcccggcagtgatagtcagtcactatggagatcgcggatggtaacgtcctgtactggacatgttttagataatcaacgcgccaccactcgcggagttttctcctccggtagtcatctcgtcactttgcattttcaacctcatcctttcttttcatgtgttaccgacgccgtaaacggtgcgcgtagccgtttttcggcattttatccaaaagcaaactatggcttacaaggaagccaaccctctgatgttcgtgcgcataatcgcgctgccaacggcgcgtgtgatgaatacaaacaactcaaggtgctctccatgggaagacaaaaagcagtgatcaaagctcgtcgcgaggcaaaacgtgtgctgagacgggattcgcgcagccataagcagcgtgaagaagaatcggtcacctcgcttgtgcagatgggcggcgtanaagccattggtatggcccgcgacagtcgcgatacttcgcccatcctcgcgcgaaatgaagcgcaattgcactatctgaaggctattgagagtaagcagctgatattcgccacgggcgaagccgggtgcggaaaaacctggatcagcgcagcaaaagcggcagaggccctgatacataaggatgtcgacaggattatcgtcacccgtccagttctgcaagccgatgaagatcttggcttcttacctggagatatcgcagaaaagtttgctccctattttcgcccggtctacgacgtgctggtccggcgcttaggggcttcctttatgcagtactgcctgcgaccggaaatagggaaggtggaaattgcgccgttcgcctatatgcgtggacgtacctttgaaaatgcagtcgtcattcttgacgaggcgcagaatgtgactgccgcgcaaatgaaaatgtttttaacccgcctcggggagaacgtgacggttatcgtcaacggtgatatcacgcaatgcgatttgcctcgcggcgtgtgctccggattaagtgacgcgctggaacgtttcgaagaagatgaaatggttgggatcgtccggttcggaaaagaggattgcgtacgttcggcactttgccaacgtacgctgcatgcatacagttaagtgtattatcggtgcagagcccgggcgaaccgggctttgttttgggtgtttatgccctgactagcgctttttctgaaacaaccatttttatttgcccctggctggtgaagtgtacgctcatcctgtggcttttttgtagttgctgatagagctcatcaggtattgctaagctctctgcatattcttgcggcgtatattggtaggctgcatgatgctgctgtttttgaaaacgcagcttattgtacagcgcccagacaattaacacgacggcattcgccactgccagcaaaaaatagaactgaagtcggcttctggcctcgctttgccagtaataacccgtcagcagatccatggcgaataagaatatgaacaacgcaaataatgtccacaagatggttgtggcaacataatcaaccagtaaacgtactggtgattgtcgggtcgtaataattaaattgttcatattaacctctcagaatcccgcgatcgggacttacccaacgggcgcgttgctttttaggcatcaacatgactcgtgtaaatgataccaatgtcgttgccaggctcagcatccagaaaataaccgggaaccaaataatccagaaaagcgatgaagtcagattatgctcatagcgattctcgatcatcaggctgacaataaattgcagtaaacataacgtacacaataatattccggcagtatgtgtcgcagcgatatgtgtcaattcaatatttaacggtacaccggcaagttggactgcgtaaataatgaaaccgaccaggcaggtgaaggcccatattgtcgtcaggctgtattcaaaaaacagcggccacattcgaaagttttctttgcgccacaaccttgtcatatttttgaggaatacttctgcaccgccctgagcccagcgcaggcgctgtttccacagcccttttaacgtttcaggcattaatatccagcacagtgcccgtggctcgtaaaaaatcgtccactgattcaactgcagcttccagctaatatcaatatcttcggtgatcatatcgtcactccagtaacccacttctgccagggcgctgcgacgaaatgcggcaataacaccggaaacggtaaatacgtttccatagatacgctgggttcgcttgatcaaaccaataattgaggaatactcgccaacctgaattttacccaccagggtagaacgtgttcgaatacgaggattaccggttacggcacccacacgcgggttgtacaacatcggttccacaatatatgccgccgcatcgcggtctaataacgcatcgccatcaatgcacaccagatattcacttttcgccgcggcagctccggttttaagcgcaatggctttcccctggttttgcgccagatgaatgacccgcaaatggggaatttgtgcagccatgcgatccaggatggcacgggttttatctgttgaaccgtcatttacggcaataacttcaatgttctcataacgctgtgctaaagcggcgtgtatggtttcctcaacgtttttctcctcattaaaacagggaatgataatggagatagacggattatctttcaactggggagctggtgcgttttctccccacggccagtggcgttcacgatagacccagaaatagacgccgccaacaatccacataatggacataaaaaacggccagaagaaaacgaacctcatcatcagttcaccagagtgaaagtacgctacgcataggggtatgcataacaccagacataatataaaaaacgatacgatgcgattaatcatttttcggataccaggctgttgaaaactcaggacgaataaggtctatttcaggttggttatgcagaaaattgtcgggataataaccatagtttttcactccattcagttgtaataggctcatccagtgagcgagttgttgcgaagaaatagcctgatgctgaccatttttctgccagttttgtgcctgtaattctaaaatagatttgtctttagcctgagggatgtttttaatttgattggtcaattgtattaaccattggtcagccgatttttctgcgacaccttccagataaggcatagccataatagcggtccagtcatagctttttaggaaatcagcataattctgtgcaaaccaggcttcactttcaggttgtattaccggaagtgcaaaaatatttcgtgcagttttaatatgtggaccgcgaatggcttttacgcgcgcactaagttctaaagtgaagtcagttaacgcacgacttttananngggcccactgtttaaattgctccgggttttgtcgaatttcgctcagactcccgctaaagcctgcttgctgataagccgtgatagccggtgcactggcatcttcataatctgaaagcaaagcatcatcgtggaacaatatgccatcaaaagcagcatgtccggcaagatcttcatataacatgccaacttgtgctctgactctgtcatcgaaaggagagagacggtgatattgttcaggatgaatttgtgcttttttctcccctgttggtaagtattttactcgcgttaatgtgggatctaaatcccagcttaataccggcatccacgcatagatgtttacacctgagcgggtacgtaattgccaggcaacccgactaaaaatatctgctttcattggtagcaaacgatttggaaaccagacctctttgaccagcccatcaccatcgggatcagcaaatgcctgcaaatacacggttgatatttgcatatctttcacccgctgaattagcacatcaatattgcgatccatttgctggaggttttcgtcataaacgtaatcaagatcgatatgcattatccgttgtggtgatttttcctgtacggtaataatttgctgggcaaactcttttaatgagggattattggcgattaatacccgcggaatggaatccaattgcgacgcatttgccaaacctgattcaagggtgaagaacatgtcataaccgagtttttttaattcctctatcgctatgccattcgcttcgccataaggccaaataaaaacgtgtggatttacctcaacctttgtacgcaggtattccgtcatttttacagcatccagacgaattctttcccggtattctgctgcggtttcataccgtgcgtggtcagtaaaatatgcacgatttacatatacaggcaataagctgccggtggcattagcctgaataccgtagtgagaattccatgtatgagaagcgagctcaacgagccgggaacgcgcaacttctcgcacttgttgccacgtggcaaaatattctcgatcgaccaactcatcgccaaattttacttgtttatccgctggcgtatcgacccaactgccgacgggggcccatacagcaggccactggaaggcctgaagaattgggaagacgcgggtataaaaactctggtagccgtcatcaaaagtcagcactacagctttttccggtagcggttttcctcctcgatgtgcttcacgaatttgagcaatactgaccggttgataaccgttctcgcgcagccaggcaaattgttcacgcagtgctgatgtccgcactgacataaaacgctggtcggcagcttcgtcttcaacgttatgccatgaaatcgctacaaaaccattatgcggccacggttgctcggcgagtaaagattcgcgatcctgtggcggtataaatgatgttcttgactggctaatgcacgcggtgagcataattatactcaccagcatcaggagatatttatttccattacgtaacatatttatccttaaaatctgaatgtcatatcgaattcaacgtataagttgtgttctctgtcaccgtcataaggtcgtttttcccagcgtagcgttgcgccagcatcaatcacgtcattccagctaatgcgttgcccgtagccgagttgggtgacgacatccgtgccataatgtttttgccaggaggcaccaacacctgcgctgaatatttgctcccagctattttcatagcttcgccataacaaatggcttgcctcaaatgccggaacaatatcgaacgtttttatagggttgtagtatggggtatcgtgttctgtattttgttcgtaatacagactgggtaggaaatcgacaatcaaatatggtgaagaccagatgcgttcctgaccctcaagtgagacttcatgacgctggttactgtcggaaaaatcagtgaaagcccaggagacaccgtacttacgccgctcattttgataccagcgaacataagcctgagcactgttgcctgtaacaccatttttcattgcccgtaatggaacgcggtgagagaggcgttccagttgcgaaccaatacgccagttatcattaaaatcataccagccagacaggcgcgcgccgggtttatgctcatgattgaaaacgcgttcagcgtactctgcctcgagccagatattacgtgaccgccactcaacacccgcaagccagtcgcgaacaatcccttttccttcgctaaattgtccatcggcataaccgaatccagcaaaaccgcgccagttatccttcagcggtggtgaataaacgatggtggttaagtcgacatcatgtttaccactatccgggccttcggcatcaattcctgttgagccagcgatacgaagctctgcaagattatgtacatcaaccgcacgttttaatcgtacaacgccgggatcttgcggttcacgttcgacaacatcgtgcgttaagacagctgcctgctgccattcttgtaacgttaatgctgtccaggcttgttcaacctccagattaatattacgtggctcgatcacttctgctttttttaattcattttctgctgcacgaggccaaccgcgggcttgtaacacactcgcgtaatcaatgcgcagtccctgatttcctggtgcgttataagcaagctctctggctgtcatttcagcctgaggaagatcattactatattttgttacggttgagagaaacgaatgcccctgtaaccaggtatcattcgggatgctcgtaggcgtgcccattaaccgaaggaaaggcggcgaagtattaatggtatgttgggtgacagttagcgcgcccggataattttcactctccaggtggctgtaaaagagatccgcaagttcttcatcggataaatccggggcaatggtctccttgtgataaaagagctcggtcattattgactgtgcttttttcggctgatgatctttgagataagccgatgcaacccaatattgcccccagggcggaataatttgccccgtcttttttaatcgctgatagtgagaaataacgtctttataacgatcgcgagttaataacncgccaagatgatcaacctgaatacgctggtactgggcagtacggtctgggttatcgtgccacagaatttctaatgcagcgtattgggcgagggcgcgatcggcaatggcataacgttcactttcactgcgcgtaggcataaacgacagtctgaccagttcggcatgaatatcagcgcgaatatctggcgttaaattggcatcgtcaatcgcggcagcaagttgattattacgtaatgcctgcacgtattctgtgggatattgttgcgtagatgcattttcaggtaatgactctgtcatcgcccgtaattcatcctgatgacgccccgccagtttatagatataggcttctgcgagtaaattggctttgtccggtgctccagagttaagctgcttaagtttaaccagcgcagtatcatagtgaccagcatctgccagggttaaaatttgtccccgttgataatccttattttgcggctccagagagagcgccttttgccacagtgtaagcgagttttgccattgttgcaggttacgataagcgacggcgacagctgcataaccacgcgctggtaattgctgatgacggtagcggttgtaaacggtaataacctgtttatcttgcccggcccataaggcaatctgtaaccagtcagcaatttggttattgctgantgctgattttantgcaaaccatgacaaagctggctgagtattacccttgcgagcttcaataatcaatgcatcataggcgttattaacagcactcttcgccgcgggactcgctgctaaaaatgcggcagtaagaagtttcaaagcccatttggttttcgggcacctttttctgctacttgaatacatcctgtattactccatgtattgccaaaatctctctctgtatctaattacaggtaactgaaaagaaagatatttttgcacctcataatccgttattaaacgcggaagagagacgtgaattgttgatgatgagaagaagaaatgatgagcagagtgtccatataaaatccttttctcgcccgaaaatccattccaatgatgaggatcttcaggaatacggcataaatcccaatgcctttttcaaaataaattaggattaaaataattaaatcagtaaattccgatgcatgatttcggatttttcgaaagtcctgatgaaaggctgcgctacggcactcacggatttaattgttattcctaatgtatctatgaattaatgttttataaggattttctataaccatttataagtattttcaagcctggcttgttgcaaacaatgtataaagcacttaggtaataataattacattcagcaactatcatcatcggtattgtttgtgggcggaatttcatattgacaacagtacagttcttatatctattaataatagaaagggatctacaacctacagattggtgtagctttatggaaaaagactatttgagaattagtagtactgtattagtgagcttattgtttgggcttgctttggttttggtgaatagttggtttaatcagccaggcgttgaggaagttgttccacgatcaacctatctgatggtaatgattgctttattttttatcgatactgttgcatttatttttatgcagttgtatttcatttatgaccgtaggcaattttcaaactgtatacttagtttggcttttctgagttgtttgatttactttgttaaaaccgtcattatcattcagcaaattattgaggggcgtttgacaagcagtgttgtccaaaatgacattgcaatctattatttgtttcgtcagatgagtttgtgcatattaatatttctggtattggtgaataaagttagtgaaaacacaaaacagcgcaatttattttccaaaaaaatgactttgtgcataagtttgttttttgtttttnggggggcgatagttgctcacataatttctagtcattatgagagctacaatttacacattgccgagttaaccaatgaaaatggtcaggtggtttggaaagcctcatatgttaccataatgattttcatgtggttaaccttgctttcggttaatctatactttaatggtttacgctatgatatctggaatggagtgacggtgattgctttttgtgccgtactgtacaatatctctctgttatttatgagtaggtatagcgtgtccacttggtatattagtcgcactattgaagtagtcagtaagttaaccgttatggtaatatttatgtgccatatattcagtgcgctacgagtaacaaagaacattgcacatcgcgatcccttaaccaatatatttaacagaaattattnnnnnnnnnaactgacagttcaatcagcatcagccaaaaaaacgccttattgcgtcatgattatggatatcgaccacttcaaaaaagtcaacgacacctgggggcatccggttggcgatcaggtgataaaaacagtggtgaatatcattgggaaaagcatacgaccagatgaccttttagcgcgcgtnngcggcgaagagtttggcgtcttgctgacggacatcgatactgaacgtgcgaaagctttagcggaaaggattcgggaaaatgttgagcgtttaactggcgataatcctgaatacgctataccacaaaaagtgacgattagtattggcgctgttgtgactcagggaaatgcgttaaacccgaatgagatctatcgactggctgataacgcactatacgaggcgaaagagaccgggcgtaataaggtggttgtgagggatgtggtgaatttttgtgagtcaccataaagcggcattttagcgggtgattttggtaagcgctaaatagctattcgcagacatgcgtaacaattttcagaaatatcatagtactatatgatcttaaatgcttatcattgatcagtctgctatcacccgcttttactggcaattgtactataatttcttgggttgcatcaccctgatgcgtggggaaacatgtatggtattcaacaaaaaaatgtttgtactcattataataccaggcattctgggggtgttactgtcgtttgctatgtcagtatttcaaatgaatcgagatacgacaattaccgccggtattctgttaaaacagcttgataatgttacgcaaattgtcaaacatacgacaaagcttacttctattctggtgatgaaaccctgcaaagatatcctggaacaattgattgctaacggagcattgaccccctatgttcgaacaacgggtcttatagaaaataatttccaaatatgttcttcagttagcggtttcaaaaaaatgaatgttaacgatgtttacggtacgagctttcacaataaaaataaagaatcacgcatagtatcaattagcggtacaagttttgtaccaggtaaaacagccatagtgttccttatgccaatagggaatgatatgacagcttttagtattgtagagtcacgatatatctatgatctgatggatgttcttgatgatgagaatgatgattcattttctcttcgctttactgaagggcctgcaattattagtggtgtaaataataatgacaggttatatatgttaaaaaaagattttaattctgcgatcagtcaggctagtcttacagttactacgccgatgatttcattatatccctatgtcattagtaatgtattttacattcttccattatctattcttctttcttttatcctgtacttcttatggcagcgctggatatctcggaaaatgtccctggcagaagaaattaagaaaggaatgtcatccggagaattttctgtgcattatcaaccagtatgtgacacgacaaccaaagcgtgtctgggggttgaggcgttaatgcgttggcaacgcgaagatggtaaaaatatatctccggtagtttttatccgcgctgcagaagaggaaaatttaattataccgttaactaagcatctctttgaactgattattcaggatgtacaaagctggaaagtgaaaaagccgtttcaccttgggataaatattgccgctgaacatcttgcacatcctgattttgttgctgatgttttacatataaaaaatgcaatatctgataaatttaacattgtccttgagattaccgaacgcaatctggttgaagatactgatcatgcattacagaaaataaatgaattaaggagccatggctgtgaatttgcagttgatgattttggcacgggatattgttcccttggccttctgcaaaagttgtctgttgattatcttaaaatagataaaagctttatagacacgctcactacagcggaagacgaaacgcctgttttagatattattattaagctgagtaatcgactcaatttgataacgattgcagaaggtgtcagtacctctcaccaggcggaatatcttattcataataacgtgacattagttcagggatacttatatgcaaaaccaatgaaagcgacagagttttatcaatggtatgtaaacagataaataattaaccaatattggaatggttttttattgccttaaaatataaacaaagccatcagaaggttattaactggtgacaaacgccaggagcaacaatgctgttagtgggaaatacatatgaagcgtggtgtcctgcctgtagagaatacgtagttgtaatcattttgacgtgtaacatannnnttaattgaggtgtcaacttttatgaaaaaatcagaagtgatattttcaaggatttcatcactaatgttatcatctttttgtattttttgtattttaacagtggtgaagtaaacggtatcacggaatttcttgtatgtaaaactcacatatcggcggatgaagcccatcttttttccatctaccgtgtatgcgcccgtgagatacatgtttcctgtgttattttcagaaatcatatttaacgannnnnnnngatccatttttgtatgatcggtgaaattaataacatgggcattacatgatatgttttgctctgctggttcattggcatgatgaaacgcaatatggctcagaattgctgcaataaaagcacataaaattattcccgcaaacagaaaatatctttgagtcatatgattactccgctttataatagagagagttgcaattatttggtgattcagagtttaacatctgactacaggtganagcataaaatccgctcatgctatcatttgttgcaatgtaaatgtaaggatgtattttgcagttaatttccatcttctgcaatttttcaataatcggtgataacatgtctacggaattaaagtatttattatcatagaaataactgcatccttcctgagtagggtgttgagcataatttgagaaagcatctattttttttatagtgtgggatttgctttgaaaagccatatcgaaaaaataagaagatatatacactatcccccatgccgcaaaaaaacaaactataagtaatgtattctttgtggtaaatataccttttgcaatgtgatttttatttatattttcagtgtgggtaccattctcttcactctcaacactttcattctcattgtgattattgtcgagaacagttatgctgatttcttcattgattttgaagcctttacggggcaccgttctgataacatcattaaatatcgtcgctgagctgatttcacgaaaagaacgtcttatcatcgatatattttgatataaagtgttggttgcgacatcggcactgctatcgctccagactttttcaaagaattgattgtgtgacacgacactataagcgttatctaaaagtaactttaagcattttcccgcaggataagtgagtatcacttcctctgatgtaaggagtgatgttaacttattagatgatgagttgaatcttacttcatcatttataatgtagatcattacattttataccttagttgtgtattacaaatccagtattactcagaaaataaaggcaagaacattaagtgcactatagtataattncctaaaaatgcaaatctgaattatctgatttttaagaataatcttgatttaattgaaattcttaaacgatgtatatttctattaaatgctttctgcagtgatgtgaattaggggtttttctgcatgtactaataaaaactgcgtatccccgttatagggaaagaacgggacgcatcctccacccatgacactaaccgtgtgattggtagttccctgctgtgcacttctggtgaaatagaagaagctctatgtgccgaccggtactgtcttttatccgattatttaccagtgacaccttgatatgaggttatatctattattgctaggaggtaatatatgcttatgttattatccaaagcgccaatagtaatttagataaagattatagatcagcaagcaaatccagtctgtttttttgtgcgtactgcataacatctatgatgactatatttttacgtgatacatcactacttaaatgtatataagatttgatgtttattattcatgctgagttttaatgtttatatttttntattgaaatctaaaaattacttaaattatcccttaaatattacttactcataaggagcaatgtgtgatatgagcttttctattgaagatttttcattggattttttttcattacataacaaggtggccatcgtaactggggccgcgggtgagctggggagaggcttatgctcggctctggccaaagcaggggctaatctattgttggttgacatcaaagagcctgataatagatatttgaagcatttaactcatgaaggcgttgaagttgagtttatgacaatagacataacaaaacctgatgcatcatgcaccattattaataggtgtctggagcgtttcggtcagttagatattctggtcaataacgcgggcgtgtgtaacattaatcgtcctatcgatttcaatcgaaacgactgggatccgatgattaatctcaacctgaatgctgcattcgatatgagccaggccgcattgaatatatttgtcccgcaaagaaaagggaaaattattaatatgtgttccgtattgtcatttcatgggggacgttggtcgccagggtatgcggcgactaaacatgctttagcggggctgaccaaagcgtatgccgatgattttgcggaatataatattcagattaatggtatcgccccaggatattatgtgagtgaaatgaccgctattatttataataaccctaaaataaaagagttaataaaagggcgtataccggctcaacgctggggaagggcacaggatcttatgggcgcaatggtgttcctcgccagtgccgcttcagattatgtcaatggacaactattagtcattgatggtggatattcaattcgttaacgatttttggctgcgttgaggtgttttgactggaaaatggagtggagagattttgtcatttctccacttccggtacttcaggtgggtatagtggttattcgttagcgttgaaccatcgcgatgagtttacataccactcagagcattattgcgctaattgttgttttatctgtgcaccattatcatcgagatatgtcgccgcaaccacaccactaacgttattacttgctaaccagtaccgtcgttgactgaagggttttatcatcatatcgctttcttgctgcacctttgtagccccaatgctgatggaggtgaaagagatattcagtggtgttgggttattaagctcaatatagctactgctgccgtcgttacccagatgccaacttattttacgcatagcttcttggggcgtcatagttacagattttggcctgtaaaagattttaagttgcgtattcattgccagcgttaaatgtgtgggatcttgatggggagtttctggcggcatttcataaagatttaaccagaatgcagattcgcgatcctggggaagtgggtcatgattatagataatccgcaacccctgggttcgtctcgcagccaggcggaaaaccggtggcagcaccacaaaggggggagaagcagcttctggggaaccttcaccattatctacccaactttgcaccagtaccggatagtcattggtattgaccagcatcagtgtcttttcccgatcgccatcgcgataaataatccgtgaagaagccggcatgatgccggcttccactgactgtacgaacaagacggttaagagcagcaaaacggatttcattgcattttcaccaatatataagccgttgcccgcacttttcccgcactgactgtctgatttggcagtttcttcaaccgggcgataaaagagtaactatagctggagtatccggggtgagtcgcaccttctaatgttgccccttcaaatacaggataccaccccgctgcatttcctccgggggttaacttcgcgatgcccggttgaccaaccagcgtcatcgccgtatcggggtgagcactgttagaaatgtagatcccaacgccctttgccatctctgctgcgtcataattatcagagaccagggcgctgacgccgccgttgctattgataatccccagtttttgcgccgctgtatatgcaccttcagacacctggattcctaatgctgtctgagtatcgctaatccctgattgaaccgagttactacactcgacgcggacattaaaattaccggtactttccatgcccgcattcagttgtgcttctgcaattgtcggcagcaatactaacggcgtggcgctgcgggcaacgcaggtggcattgttgtagagtcgattggccgaacgcattccgtaaccaaaaccattatcagcaccccagaaatcccaatgaacagaactatcttcgccgggctcatcatgaccaaataaaatgccgctggtaccggaaagctgaatataggcattgggctgaacacagttatagattgtaccggaaggttttgcgaatccgactccactaccatctgtattattattaccgcaccaacttgttgttgctgatgtatcaggtagcgtactgatgcgataaagctcagcatgaagaggagggatatcctgtaagcgaatctggattttagttccctgagtggcataactggtgatgggcactttcttccagtaacgaccaagcgtcacgcccgccatggtctgcttgagaccgacaaaagcgaaccaggtggcatagacatcactcagaccatcaggcccgcctgcatcgtaaaagccccccacgcggtcgtcgccattggtagcgaccagaaaatagatgtttggcaaatctgttgcatcacattcccacaatacggagcttcctgtcgcgccacctgatgtgtagttagtgggaggtacgaccgttgtcgcgaggagtgaacctgctggcgcaaaataggtgtcggtcatattaatttttccgaactcaataagcgctgtccgaccatcttcagtttgacctatctgtgtgtttgtacagttagcccaagcggatgattgtattagtgccaccaatatgatggagctaatcagaatgtgtaaaaaagtcgatttagacatcgggttttctctgtatcaagactgacaggtttcattcaggcggatgatagggctattgctgtccttcccgctgatatcaaagggcaattggcagctatcgttagcacnttcaccccagcgaactgacaagtggccttttgtctgttctgtgcggaggtaaatttgccccccctgaccggctataccgacgactgtattattctcatccagcacatcggctcccattggcagttccgaaccatctgccatgcgggatttaatcagcaacgctttaccaggacgggtacggaaaattactttcaccgccgcacccgcaaccggtgctacctgtctttcactgtcgaccaactcggcatcgccatccattccttgtggatcgagagatatacggttgtagcgatagggcgttactgccggaacaagcgcatagccactgtcattaatttccagctgactggagttatagacttttgcaccttctgcgcctttagcttcgaccagggcgaacgtttcacccagataaggtccgaaagtaatgccgccaccatgcacagccatcgcgccttgtacgttacctgaagcctgccagtaatcctggcccttcgatgcgttcaatccgacggtagtttgtgaaaaacgtttttgcatgtttccgctaagcgtcgtctgcttatattgttgatcgcgcatgacgttcaggctgtagttggtggtctgtgcttcatcaagcattccggttagcgagctttgtaattgcgagctaccgtcagttgaatgggtccagctgttgctaagacttggtacacgaggtccattgccgccaagtgggaatgagaatgaaagggatgttaccgtctgcatatcatcagaattgtctttatagccgcccattctttggcgtccgacggaaaggttcatactgatgccatggctaaagctattgctgtaacctaactgaagctgtgtatcacggctcttgccgccacggtagttctgtgttgaacctgacacaaacaggttgccgtaattcgcaaggctctgacttaacgtaagatcgaagcgcgactgttgacgccactggctggagtcccatgactgtttattgctggcagcatgacgctctcccagcacatcagccagatcacgatagccgctggtagagtatcgataacctgccagggagacggtggttgaagtaggctggaaagttttactccaggttaattgcgacatccaaccactctgcgcttcgctttcgggaacacgcgcatgggaccaagtgaggtttgccccaaatgcccccagcgaactgccatagactccgcccagcatcagcgcctggtagccatcagcgatacgcgaaccactgttaaatgtcagcgtattagtcatcccgtgctgccaggtaaggtcaccaaacatcgagtcatcaccactatcctgcgttttacctacttccacgttataacgggaagttcctggacgcatcgattctggtacggctgaaaaggggacactgaaacgactgactgcgccgttagcttccgtaacggtgacatccagatcgccgctgtagctggtggggtataggtcgtttatctcgaaagggccaggagccacggtggtctgatatatttcatgaccgttttgcattaccgagactctggcgtttgttgcggccacgccgcgaatagtcggcgcatagccgcgcatggagtccggcagcatacgttcatcggtcgcgagactaacgccgtgataactgagtccagagaaaaatcttccgctggtgataagctgccccatcattaactggctatttatggcgggcagcgggcgttgcaaatagctacgaatattgttccactgattccctttgtcattatcccaggtcatgttggataactgacgatattgccaggcaccaaggttgatgccaccattaaatgatgcccatagcgaacgctggctatgagcattctgccctgaataggcaacgttgtaatagttggcaatataattcatgaacgccagcgatgctccggtatccagctcgctggggggaacatagccgcgagggcgactaatcaattgactctgtggcaccgataagtccaggcgcaattgtgacaactgtgtctggctggtgatgccgggagcgagttccttagcaaacgtacagacaggatctttttcccccttatcttcccctgttttgaggcctatcgcgtccgcgacttcaggcgtcaggcagggcagaacgcgaccatcagcggcttctttaaacgtgacattccaactgcctgacaacttattgttggtgtagatatccattttataattgcccggtgcaacagactcacgtgttgtcagttttgctaatgacgactgactaaatctgctgccgcggaagagttgcgggtcaaaggtgtagttgtcttcatctgacggtgttgcgggtgagatttcgctccccatgaccggttggcaaagtaaaaccaacattgccgcagaaattgacacaacggatttattcatctcgacgtactcgtgcgtgaaaaaggataccnctcaaaaaaggagaaagaggttataaggcatgctcagacgtaacatttacgccatagtcgttgacggtcactaaatggatctgcgcaccgggagcgacactgatgccagagggtagtgtccattcagttgtgctttgaggagcaatcattaccgaattcgcgagggggacttttttaccattattaagcagttcagcggcgcgaattgtgacgtaatagcccgtgggattcgtcacttcaatgcggttctgttttacctggtaagtcaggtttttgggtgcgtcactggatttaccgacaatcgagctgggacgatagaaaattttgactcgattagtcagggccaggatgagctggttctgacttttatcattcttattcagataaggtagttgactgaaactaaaccagaaaacagactcgcgatcctgcggtaaattattaccagtgtagagcaggcgtaacgcctgacctgcggcagcttccatgcgaaatgtctgcggggttggcataaacggtacattcttgtcagaaccacgttcatcctcaacatggatattaatgatatagggctgatcgctggtatttcgcaactggatggttttttcctttgcgtcaccagggaaaataatacgggttccggtcattaccacgctggcaaacgcgctgctgctcatgctcatggaaaatacaagtaccagtaaatatgcaaaaatgttcattcttatcttttccatgtccatgaaaaatcactattaattgtgcgaagaaatactggctggcatttactgccagccagtagattaattagaggtagctcagggtgtattctgcgacagcggtaattttaccggcagtggcagcagcgctatcgataacgaagtaacgcgcaccgaagtcgtagctggcttcggtatcgccaactttcagggtcagacccggtacgttagtcgcgccagccagagttactgggttaccagaagtgctggaatccattaactgaatgccaaagcctttcgccgcatcgctgctggtatcacggtttcccataacacccgtgctagcgtcaacgtcgtagcccaggaaggtggtgttgattgcctgatctgcaccagttggagcctggcagttagacacagaaaccgtaaacggcgtctggcctgcgctctgaccatcagctaaagttgcaccgaagtcagccatggctacggtcggcatcaatactactgaattggtttgaccgttgatatttacggaacaggtctgatcggttacttcaccctgaaaagtgactgtaggcgcagccatagttgaaaaaggtaatgcaatagctgccagcagagctgcttttttgaaagtagaaaacatattaatatccttgaaatttagagttaatatagaacgagttaattaatgcaattgatacaatctgacgtttttaaaaccggtaaatctccttaactgtataagtgccttgaaaatgtaaaagccatcactatcacaagcaatttcaaacttgttaaaaactgatattttatagtgactaatatacttgacatccttttttagcagggtgtgcaatattcttttgttatctatcttaaaatataagtaatagatatcccactcataccttgtcagagtcacctgcctgacttgctggtctttatcagtacttttaatcaaagtaatgagtttattcaattttatatatcggctaatgaatgtttgctctgaaagtganaagaagatatttctgtttttcatctttcttagtgaaacaatcattaaaaacctggccaaatctggcagttttgcaagtatacttacgtcatccactgcgacaagaagtacgttttttgtaaagcggttgtcaaatctaagtgtacttaggtcattattgcatgcattttgagaacaaaaaaaacactcaataaaaaaacgataatggtgacctagttttgcacttaatccctgaaggtaatatagatcatccgaaatgataattacccttgttagtaagttcttgttcattgcactaactcaattgcttgcagcaaaacagcccatcttcatggagtaaaaattttgaaagtgaataaagatttttactaaagatgtaacaatgggcattccatatgcgacataacaactgcagtaacacaactaatctttgcgtgttctttatattagagagtaacagcgtgatatctgtatctctaaaagaatagcgatgtcctgcaatcgatgagcacaatatatgacattcatcacatgtataacaattgaattttcattcatactaatgttgaacggtaatatagtaatttaatgcttgccgaaagatgataaacagagttttattctgaataagagtgttttttgcgattttctcaggttgtaaattctgcataatggctgaacctattactttttatgtcaaaaaagccgtttttatangaataaaacaacgatatttaagagtgctggcagcggagaaaagggttaatacagtcatttaagattacttcagcttttcctgtggtgagaaatgagcggaattgtagcgcaatctgtaaaaacaattcctcttaactaataanaatcgcgaataatcattgtgttagattgatttgttgcaaaataataacaacattattaaaatcattacaatctttaatttagaataacatttttatgaagaccagaatacgttaagggatgatgtatagcggtgattgctattagatgggaatgaaagcttgccaaaccgttttgctcttntttctccctttcaacgataagccaggcataatgtggctgcttaagccaattgtcgcaaagccaaagctctctatatagctaacctcatggttaatccgatctcagtaataccatgagcaagaactctttcctttttatatagctcttaagggttacatgcgtgaatgcaaatggtaatataatgaaatgtcgcctgcccgtaatgaccataaagaatctaccccgacgtanaagatatagagaataagatgcagtaatgatgatgctttgttaatcaaataataagatttaaattaattgtaactcaccaactttgttgttttattcggatgtctgaaatgatgtcgtacagaaaactacatatcatttcagacgtcctctaaattggatttttttcacccaaggagcaaggatgggggacttttaaattattgtgttttagtaagttaggttcttcgccgttcgatgaaaaaacaataactcttagttgtttttttgagtccttatttcagcttatttttcgtgattttttattgcgccaggtgataggatttgccgcaatcatttttgctgatattccgtgagtcatcaaaagtgatctgcatgtccaaaatgaatagcatcaataaggaaaacgttagtggcgatgataaatttaagtaaggaagcaacggtggggaaagcattaacccctattgctatacttatgatgttgtcttttcctgtagcttctcaagcggcgggattagtcataaaaaatggaacggtatataacgccaatggtgtgccagtcgttgacatcaacaaacctaacggtagcggtttatctcataatatctgggataacctaaacgttgataaaaatggtgtcgttttcaataatagcgctaatgaatccagtacttcacttgccggaaatattcagggaaacagtaatctgacctccgggtcggcgaaggtgatcctgaatgaggttacttccaaaaatccttcaaccattaatgggatgatggaagttgcaggggataaagcggatctgattattgccaacccgaatggtattactgtaaacggtggcggttcaatcaatacaggtaaacttaccttaaccaccgggacgccggatatccaggatgacaagctggccggttactccgtgaacggcggtaccattacgctcggtaaactggataacgccagcccgacagaaattctgtcccgtaacgtggtagttaacggcaaagtgtctgccgatgagctgaacgttgttgctggcaataactatgttaatgccgcaggccaggtgaccggtagcgtatccgccacggggtcccgtaacggttacagcgtagatgttgccaaactgggcggaatgtatgcgaacaaaatcagtctggtcagcaccgagaaaggtgtgggggttcgcaacctcggcgttattgctgggggtgttaatggtgtcagcatcgattccaaaggtaacctgttaaacagtaacgcccagattcagtctgcaagcacgatcaacctgacaacaaatggtactctggataacaccaccggtacggtgacatctgtaggcactatctcgcttaataccaacaagaatactatcgtgaatacccgtgcgggtaacatctctacgatgggcgatatctacgttaacagcggtacgattgacaatactaacggcaagcttgcggctgcaggaatgctggcggttgataccaataacgccacgctgattaactctggtaaagggagttctgtcgggattgaagcggggctcgtggcgctgaaaaccggaacgctcaacaacagcaatggtcagattcgcggtggctatgtgggtcttgaatccgctgcgctgaataacaacaacggtgatatccagaccaccggcgatatcgccattatcagtaacggtaatgtggataacaacaaaggtctgatccgttcgtccaccgggcatatcgttattggcgcggcaggtagcgtaaataatggttcaaccaaaaccgccgataccggcagttctgactctctgggcattattgcagataccggcgtagaaattggtgcgaacaacatcaataacaacggcggacagattgcgtctaatggcaacgtctccctgtcaagttacagcacgatcgacgactatgcgggcaaaattctgtccaacagcaaagtgattatcaagggaagctctctgcgtaacgataccggggggatcagcggtaagcagggtattgaagtcgccgttggcggcagcctgaccaataatattggcgtgatcagctctgaagagggtgatatctccctgttagccaactccgtggataaccacggcggcttcatgatggggcagaacatcacgatggagtcgatgtctggcgtcaataacaacacagcgctgatcgtggccagcaaaaaactgaagataaatgcgcgcggcagtatcgaaaaccgcgatggcaataacttcggtaatgcttatggtctgtacttcggcatgcctcagcaaacgggtggaatggtcggcaaggaaggcatcgagctttccgggcagaacatctataacaacaacagccgtcttatcgctgaggatggtcctctgactctgcaggcgcagaacacgttcgacaacacgcgtgctctggtcaccagcggggcggatgcatctattcaggttggcggaacgtattacaacaactacgctaccacctggagtgcgggcaacctggatatcgacgcgaccacgctgcaaaacagcagcagcggtacgatgatcgataacaatgcgaccgggttcatagcatctgataaaaacctgtcactggaagtggtgaatagccttaccaactacggctggatcagcggtaaaggcgatgttgatgtcacggtgaataacggcaacctgtataaccgcaataccattgcggctgaaaaggggctggatattgccgcgttgaacggtattgaaaactggaaggatatttctgctggcggcgacctgacgatgaacaccaatcgccatgtgaccaacaactccaacagcaatatggtggggcagaatattgttattaacgcggttaacgatatcaacaaccgtggcaacattgtcagtgacgctgacctgaacgtgacgaccaaaggcaacctgtataactatctctatatggtagggtatggggatatcgcattgtcggcaaatagcgtggcgaacaataacgcgaccatcgaagcgacaggcgatctgattatcgattcgaagggtaacgtgggtaacaaccgcggtaatctgcatgcgttgaacggcgtgttgtctgttaaaggcaacaatctgaacaacgataacggtgaaattcgtggttatggcgatgtcacgctggcactgacgggcaactacgacagctataagggttcgctgacctctgaaacgggcgacgtgactctgacggcgaacattgtagacaacgcctatggtttgattgccggtgagaatgtttctgtcgatgctaaatcgacgatttacaacaacactgcgctgatcgcggcgaataanaagctggttattaacgctggcggcaacctcgaaaaccgcgacgggaataatttcctgcgtaataacggcgcgctgtttggaattaccgacaacgttggcggcatcgtaggtaaagaaggtgtcacgctttctgctcagaacgtctacaacaataacagcagcatcatcgctgaaaatggtccgcttaatctgctgtccaggggaacgctggataatacccgcgcgcttcttagcagtggggctgatgccatcatccgtgcggcagggacgttctacaacaactatgccaccacgtacagcgccggtaatctcgacgtttatgcggcgtcgttgaacaacgccagcgatggtcgcctggaagacaataccgccacgggcgtgattgcgtctgacaaaaacctggatctgagcgttgataacagtgtcactaactatggttggatcagcggtaaaggagatgtgcatttcaatgttctgaaaggcacgctgtataaccgtaatgccatcgcggcggacaacgcgctgaccattaatgccctgaacggtgttgagaactttaaagacattgtggcgggtactgcgctgactattgatacgcagaagtatgttaccaacaacagcaacagtaatatgttgggacaaaccatcgcgatcaatgccgtgaatgacattaataaccgtggaaatattgtgggtgattattctctgggtgttaaaaccaccggtaatatttataactacctcaatatgctgagttatggtgtcgctggcgtatcggcaaataaggttacgaatagcggtaaagacgctgttctcggtggcttctacggtttagcgttagaagcaaacgaaactgataacaccggtactattgtcggcatgtaagatgtaaccaaagacagcagtggcttttaatattaatgcgtcatgtcacgcaggggttgctgctgtctttatttagtttgagaagataatgcaattacgatttaattttggtttgctgctcattctttgttgttttcaggttgcagcgaaagacagtcttgataatttgatcaagcagcaaaaaaatgcagatgaaagcacgttgcgcgcnnnnaaattagaaaaaaaagatgtttactcaaatgcacaacgtaatgcgtttactctgggtgaactgccgcaggaaaagaattgctttatcattaatcggattgaactggaagataactttctgggtggtcagttgatttctgaagtgcaaaaagcgattgccggacgttgtgtcggtagtgctggtgtgcaaaaaattgcagctgccttgcaggattattatattaatgcgggatatatcacaacgcgaattagtatcccttcgcaggatatttctaaaggcaagctacgtttccaggttaatgccgggaagatagaaaaaacgattgtcgaaggtaatgatatccgtgaatggatgttaccttttcagcgtaacgatattctcaatattcgtgatattgaacaggggctggaaaatcttcagcgagtacctgacgttgatgtgaaaattaatattgaaccgggaacacgggatggttacagcatcgttcatattgatacacaccgggggaaaaactggagcgttcgggcaagttacaacaattggggcgatgaagaaacgggccgttaccagacaaccgcggtgggttatctgtttaatccagcgaaaatgggggatctgttttatctcgccggtacgcgtagtactaccggacagtatgaaaacgtcagtagttattattccattccggtggggtactgggagtacggctttttctatagcaaaagtaaatcgcagcaggtgattccgctttcgtacatctcgctggattatgttggcatcagcgaatacttgagcgcaaaagcgacgcataccgtttatcgcgataaaacaaaaaagttcgccggtagtgcagaactcattcgacgaaagtcgaattacacgcttaatggtgaggagctgacattacaggcgcgggatatgggaaatatcaagctggggctaaattataagcaacagttacccggcgcgttctgggattcaaccctctcgtggcaacgctttttaacctggttcggtggtgaaaaaacgccggatatgcaatatggcgacgttagcccggtaagcaatatctttaattttgagggtaactatacccgacaaatagagaatggatattacaataccgctttttttgcccagtacgcaccgcgtgaactgactttgcaagataaaattacagttggcgatcgttggagtattcgcgggtttgaaaatagcgtaggtttgtcagggaatgatggtttnnnnntaaaaaatacgctggcatttcctttgcctggaatgaaagctaattattatgccggtcttgattttgggcaagtgtatcaggacgcttcttatggcgatgaatcactggtgggctcggcagttggtattgatggaaacattaaaagtcttgagtataacttttccgtttctaccccattaaagtatccggcgacattagatattgatcgggtgaatgtaaattttaatttttcgtaccaaatgtaaaggataacgagactcatgagaatagggacagatattgttgaaattgccagaataaccaaagccattattaatggagagatggttttttatgagcgtgtttatacttctcatgagcgcttactcattaaccctgcagaacctgattatgaacgggcctctggattctgggcggcgaaagaagcgttagttaaagcgattggttgtggttttcgtgatggcgtacgtttccaggatattgaaataaagcatgatgcagccaaagcaccttatttcgttatttccggaagactacaagaaatttttatcgggcaggggttgcaaaataactccctgagtatttcgcattgccgtacccacgccattgcgactgtcatcgtttattaactcaacatatgtgatgaatatgtacaaatataatgatttaaatgaaaaaaccgtactggtgacaggagccagtggtgatattggactgggtatttgcgaaaaatatctggagcagaactgcgatgtttatgcgctctataaatccaacgacgtgcaattaacggcgctgaaagcaagccatcctgcaggcgataaactgcatattgtgcagtgcgatcttgcctgcccccagagcgtgagcgcattgtgcgaacagatagagcgccaagctggcaagattgatgtgctggtaaataacgcgggcatcgttaaagacagcctgtttgcctcgatgagttatgaggatttcacccaggttatcgaaaccaacatgttcagcattttccgtctgacgaaagacgcgctgatgctgcttcgtgcggcagaaaatcccgccattattaacgttgcctctattgcagcgctgatcccaagcgtcggtcaggcgaattacagcgcgtcaaaaggggcgatcctaggcttcacccgcacgctggcagcagaaatggcaccctggggcgtgcgcgtcaacgcggtcgcaccgggaatgattgaatcgaaaatggtgaaaaaagtatcccgcgcagtggtccgtgcggtaaccagtaccatcccgttacgccgtctgggtaaatgtgaagaagtggcgaacaccatcgtcttcttaagttcctctgcctccagctacattgtcggccagaccatcgttatcgatggcggcctggtcatgcggtgatttatgtctaaatacacgattccttcgaaaatcttcctcgaaatgggcggctggcgtcagccgctgctgatggtcgataaaattgcagattataaatacggtgaaaatggctttgtcagtgtcgtgaaacacgtcacctataacgaaccgtatctactggggcatttcccggaagatccgattatgcccggggtgattatttcggaaatcttcggccaggccagcgagtatctctctttcctgaccgacatttgcgatatctggcgcgaacgttttgaggaagagctgaagtcgttacgtgatattcacgcacgcattcaccgccctgaaatgctggagattatccgtacccggcgcagccaggtacgcggcgtgctggcggctcagaacctgaaatttaaagatatcgcctatccgggtgattctattgatgttgtcagcaaattggctttttcggatgccagtggctttaaacactattccgtgaccgcgtacgtcggtaaaaagctgattagtcagggcaccattatcaatttccgtgaaaccaagtaatccaataagagagtaaatattatgtctaccatgaatgacgctattgaacagcgtaaagaagttctgatgaccattaaaactgagatcatccagcgactgaatattcaacgcgatgaagcgcaaattgatgatgatactgcgctgtttggtaatggttttaaactggactccgtcgatgcaacggaaattgtcgttctgctggataaagtatttgatatcaagatcagcgaaagtgacgacccgtcctatatgcgcagtatcaatagtctggccaccttcgttattcaaaagaaaaacgattaactacttattaaagaattaattatcaggacacgtttatgaaatctcttgctgaatttcacttgaaaaataatgcggtaatgggggtatataacaaccgtaccctaccttcttcttatcacgatgctatgaccgaatataaagccgttcgtgaaaacgcgctgctggtggactattctcacctctctattgttagcgtcatgggcgatgatgcctgggcgctgatcaaccagctggtttccgcagatgtctccatcattcgtgatgagcaggcaatctactcactggtgttgaatgaagagggcaccattcgcggagacgtctatgtgctgtgcagcattgacggttattacctgctttcagaagatatttcggctgccgaattgatcgccagcatgaataccattctcgaaaaagcggaagaactggatattcaatcgatgcctgaaattcaggatatgcgggaaaacaactggggggcaatcctgctcgaaggcccatactcctgggagatcatgtctgaaattcatggctttgacgtgattggcctgccttactacgaatacatgaataccgaggaggatctgctgatcttccgctgtggtaaacacggtgagtatgcgtacatgaccatcggtgagcaggcgaaactggcggagcagtgggaaaaactgttaaccgttggcgagaaatacctgatgcagaccggcggcctggattatcaaaaaatcgtacgcctcgaaaatccgtgctgggatgccagcctctgggaaggtcaggcggtgaatccggttcagttgcagatgcagtgggcggtgcagtacgacaaagatgattttattggcaaggacgcggtgacagagctctcccaggagtataccggtaataaactcatcggcatgatcgcacaggaagaatgcgaaggcattgaggctggcgatcgcgtgctggtggaaggtcaagacgtgggctatgtcgtgaaggcactcttttccccagcgttgcagcgtttcattgccctgaccctgctggaaaaggattacgcntgntctgacatcagcggctacgaaattcaaactgctcacggaattattccggcgcaatcaaaatgtatgccgtttatttataacctgagcatgttggttagcccaactgagcacagttatatcgacgcgtcaaaaaataaaagcgcagcgtaatgaatatcgccgcgtgactatagcttacgcggcttaaattaaccccaattggcgggattgccaggtattattcatgaaaacgaacaggaaaagagttgttattaccgggctggggattttgtcctcactggcggaaaatattcaggatttccgggaagcattattaaataaaaaaaatggcgttaaggatagcgaacgctttgcaaaatggtttgaaaatgcgcgtgcggcagaagtgttgcatgacattgaatactccgatctgaacgaagatgttatcgattcactggataacgcagcgctctgggcctacaaagtgggtaaagatgcgctgagtcagnnnngcctgatggatagccgtgacaccctcaaagaaacaggcatgatcgtcggtgtttcgtccgcgggaacagaggcatttttgccgctgttcgaacagcgcatggaagatttctcgctgcgtaaagcactcttttccggcgcattctcatcctgttgttccagcgtttcaacgctgctgggcttacagggtggggttgaactggtggcgaccgcgtgtaccgccagcccgaacgccgtggggatggcctttgactacatccagaatggtaaaagcaaaaccatgctggcagtgggcactgagcccatctatctgccgacctttgccggattctacgcactgaatgtcatgcatccagacacttgtacgccgttctcgggtcagtccggtatgtcgattggtgaaggcgctggcgctatcgtgctggaagagtatgagcacgccgtagcacgcggggcgaccatttatggtgagatcctctcttacgccacttcctgcgatgctttccatgaaaccgggccagatccgcgtgccagcggagcggtgcaggtcatgaacaaggcaatggcaaatgcgggcgtaaccccggagcaaatcgattacgtcaacgcgcacggtacgggtaccgaagccaatgaccgtattgaaacgctggcaatgaaaaaggtcttcgctaaccacgataaactgctggtgagctccaccaaatcttactttggccacaacattggcgcagcggggattgtggaactgattgcctgtctggcaacgcttccggataaccgcgtactgccgacgctgaatttcagccatgcacgcccgaattgcgatctggactatgtgccgaatgagtttcgcgatcgcaaagtgaacatcttcatgaagaataactatgccttcggcggcaacaactgctgcatgatcctgagcatggagcccgcgtccattccggtcagtacctatgattcgaagcgtgtggctatctcgggcgtcggtgcagtatccgcaataggccacacgctcaaccaggttctggaaaacatctgggcgcaggaccaccacgttgaactgggtagcgtaaccttcccggacgatacactggaagaagccaaagagctgctggccgtgctggatgaatcaaaccagtttgccgagctgtttgatgaagagtacagcttcagcgaagctacgcttccggaaacggaaagcaactttaaaacgttccaggtttccgggctggagccgcgtaaacacctgcgtcgtttcgatcagcgtaaagcgacccgtggcggcacgtttgccctgatcgcactcaccgaagcgctggaacaggcgaagcgtaaaatcaaacgcgacggcgatgagttgggcatgatcatggggatgtcccgcggcccgcaggaaaccacctacaaatatctgcaaagtctgaaacccgatccacgcaaagtacgtacatcggaatttcctggctcgctgatgaatgcgatcccaacgttctgcgggatctctgaagggatcaaagggtataccactacgcttgcgacaggggaaaactcggcgctgggcgcgctgacctacggttatgaaatcgtccggcagaacctgcaaccgcaggtattggttggcggcgcggatgagtacttcccgtcgatgtcgctgtatatggatgcggtgacacaaaagatccacatgacggctgaggcgagcgactatcagatttacggtaaagatccgcaaggttatgttccgggcgaaggggcttgcatgctgctgctggaagatccgcagttggctgtggcgcgtggcgctgaggttctcgcggaagtggtgggctacggcaagtcatgcagcaatacctacttcgacgcctcattgttggaagaaaaatccgcgtcgatggcgctggccattgaacgcgcccttacgcatgcgggcatctctgctggcgatattgatttggtatgtggtaccagcaacggtagcgatgaccattctcgtatcgaaattgacgcgatttacaacaccttcgccgcgcaaaacccggcggtgccggtagtgaactataacgcttgctttggttttgtcgcctctgccgctggtttgcttaacctcgccgtgattactgactgcattaagaagcaggcagtacctgcgattccaaatacggtggaattctttgatgagcgtgtgaattttgtacgccagtcgatgaaacttgcgctgaaccatgtcctgcttgttggcgcaacggaaggcggcaactactacgcgttcgtcattaagggataagactgtggacaatgccgctattatttcgggttacagcgtgtggatgccgtatgccgaagactgttcgcagttaattgacaatctgaaacaggggaaacgcgttgcgcgtacaccctggtttacctccaacgaggaagccattaaatgcgggtttaagggtaatccgtcagtggcgacgttgaaacaggtggacgatagcgcattggacctgctgtctcagttgatcgacgaagccctggaacaggcaatgctggataagcattgcctggccgggcgcaacgttcgcgtttatctgaccggtattgggccgcgtatcgacgggctggattacaaatctttctataattacaacgatgtagaagatatcaacttaacgcaatccatcacaaatctgcatgcctcaaagatgtcgcaggacacgatttcaagccatcttgcgcgcaaanatcgcttgcagtatttgccgcctaacatgaactgcaccagtaactcgtcactgactgcggtgcatctggcgacgcagggcattgagcagggcgggattgatctcgcgattgtgctgaactgttcgaaaattaaaacccaggacatctggttcctggaaacgcaatcgatgctggacagcgaacaagtgcagccgtttggtgaaaacagtaaaggtgtggcgttcgcagaaggttttagcgcgctcctactggaaagcgctcatcaccgccgggcgcgtcaacaaagtgagggcgtaagggtgcaaacgacttacacccaaatcagcgcgggccgcagcaacgatgcctcctggcttagcactaacgtgcacaaggtcatgcaggccgcgatgaagcaggctgaaattgcgctggatgatcttgcagccattcttccacacggcaacggttcggcagtgagcgataacgcggaggccaaagccatcgccatgttcgcaggggagcgacagatccccgttctcgcctataaagggcagatcggctataccgcaaccggatctggtgttgtcgatctgatcattggccaccattcgttgacgcatcatcaactgatcgcacctgttggcaacgacgtcattatcgacagcatggcttcgctggtacttacggacggcagcgtgacaaaccatagcaaacgccatttgctgaaggttggtgtgggtgtcgatggttcagttattggcgttgtcatgnnnnnnntgcaagcggggcgcgcgaaatgacggaaaagagtatctacctgtcttcctgggcgcttacggaaccggacgacattttttatttttatcanccgacctggctcaacgcctgggaagcacatatgtacgaaaggggattatacggcacccgtgctaatggctggggactgaagcgctttggcgtggagaacgatatttatgcaccagaacggatccgtaatccacaatatatgccttaccttgaggcgatggagcaggtgaccgattctgcattacaacaaatgccgactaaagaacgcatgaagttaatgaaatcgcgcacggcatttatttatgccgattcctggggcgaatccggttcgtttgaaaaaatttccagtgcgctgcatatcgccactattgatacgcttcccaagaatttacttaagaagttttcgataacggaaccgacttgcaagattcgcggcgaaaaacaggcattcgttcaggcgctgcgtatggcgcaggattatctcgcctgggatgtattcgataacgtggtgatttgtgctgcctatcgggcaattccggtgctggtattctctgaagaagatgtgggtaaaccgcctaagcgtttatttccccgtcgtgctgatgaggtgaatttatctgttgaacgagtgggttgttttattctcagccagcgtgagagcgccatcaggctgcaatgcggggaatatcattccggcactgcgccacagcatgctacggatattgatgtcatggccttcagcgaacggcaacaaatgccgtcccggcctgctgctggcgttatcgacctggtggcccattacggtgaaagcggttgtctgacgcccgcgttgagtatggattatttaacccgtcatattcagcccggtggaaaaatgcgtacggtcattgccgataaacagtttggttatcactactttgaccttgaataccttgaaggataacgacagtcgtatgcaatctactattaaatcgttgcccgctatttcgcttagcaatatttataagtgttatggcgctggggcaggaaaggttgatgcgcttaaaagcattaatcttgatatcaataaaggcgaatttctcgcactgtgtgggccgtcaggcagtggtaaaagtactctgttgaatattctctcgggtattgataaaccgaccagcggaacggtgatatttttaaataaattactgaaccaactgccagaagagcagttggctgtgattcgtggaaaacatttgggttttatttttcagttttttaaccttatgccggtattaaatgttttcgataacgtttatttcccactggtgcttaatggtcagttcagtaaaaaagaagccactgaacggacgctgcattatctcgatagtgttggattaagcggttttggcgatcgtaaacctgggcaactatcgggcggtcaacaacagcgtgtcgccatcgccagggcactggcccacgaaccgatggtggtcattgccgatgaaccgacgggaaatttagacctggcaaccggcgaggctattttggacctgttgttgacgattaatcagcagaccggcaccacatttgttatttccacgcactccagcgaattaaaagcgcgggcacggcgagtggttgaaattcaggatggagtattgattcatgactcagatgcataaaggatttttgctcatcggcgtctttttgtacgcggcgtttgtggctccgaagatttacgcggcaacacccgacgctgttaaccaggttctgcaacaggggctcccggcgcagcctgccgcgctggcgacgctgaccgaggcgttaaagaaagagtatgaagccaggcacaatgtggtggcgctggttttttacgcctatggcttactgcgtcaagcggacggttatgcggcaacaaacgattttatccatgcctcagaatacgccaaaagcggctttttctggctggatgaagcggtggatttgcaggagaaaaatcaacgcgtacggtatttacgcgcccgcgtagatgcctatttacccgcagactcagggcgttgcgtggtgacagtcaaagacaccgaacacatgctggctgacccggcgatatggacgacaacgatccgcgaccatattctggcgatgcgttatcgcgcattacgtcactgcaaggacaccacccgcgcgaatgcgttgttggcgcaaattaaagggcagaacgccgcgcttgcgcagtcgctgacgcaggattttaatgttgtaccagaatgggatagtgaagagttaacccaggtactgctgccgctgatgaaaggtgagtaaatgtccggggaaattttagctgttaattgcgttctgctgctgattctgttttttgtgttttatcagcttctgttttattcacgagatgtcaaatttgcatttttgaatctctttcgccacaagcgtcgctctttttctaccataaccgctattgtattgggtggcgtggnnnnnnntttatatggcggatttattgattactctttctggatcctgaaagagcagacgattcgtaccaatattggtcatgtacaaatttacaatcagcactattttgaaacgtcgaataaaaataagagcctgattgccgattatgcggcgttaaagaaagctattttgtcggacccgacgctggcggcggatatttccacgctctccgggcaactggagtttactggcgtaatttcacattacgagagcgaaacctccagctatttctccgcgctgggggtcgagccgttacccgctttaaagctgggttcgttcgataagattatcgcggggagcgatctttcccgggtaaaaggtgatgaaatcaccctgggcagcggtctggcgaaaacgttgaatgcgaaatatgacgactggctggatgtgatggtggtcaacacggcgggcgggcagggcgcattgtcgctaaaaatgcgtggcatttttgagtcaggcattaaagattatgacgatgtcgcgatgaagatcccgctggacaccgcgcagcgcatgatgggtacggatggcgtcagcaaagtgcttattctgcttaaagaggatgacaccgcggcgtttagcgcaaagctgcgtcaatttatcgaacgcaatcatttgccgctggtggtcaaagactggcgtgatgtttcactcttttatcaacaggttgaagggttgctatcggggatctatttcttcatcaagctgattgttgcgctgattgtcatcttcatgatcggcaactcgatggcaatgaacattgttgagcgcacccgtgaaattaccactctgcgtgccataggcctgaagccgcttcacgtcacgcgcttgtttctgacagaaggcatttttattggtgtgattggcgcagtcggcagcctgctggtggggggcgtgttagcctggattattaatctttatggtattgcgatgccgccatcgccgggacaaaccatcggctataccgcctttataaaaaccagtaacccggaattgatttgggtgacggtggtattacctattttgacagcaacaggtgcctctgtgttaccggctttacgtgcttcccggctgaatatttctgacgcatttaaattctcatagggctaattatgaatatggctttttacggcaagtggtttgcttgcctgtggctcgctacgtcgtgcgttcaggcggcgagcacagataataaggcgctggagataattcgtcgcgcnnnnnnnnnncgttcgccgnataaaccgtttcgttacacgctgacggtaacggaatataaagcgggcgcaacccagccagagaataaacaggtcctcgatatttccatgcgctttatgaaaccgcagggtaatgaaaaagcggatgcacgctcgctggtgcgttttatttatccgccgcgagataaaggaaaaatcatgctttccgactggtacgatttatggttttacacgccggaactgcgacgtcctatgcctatttcacggcaacaaagattaattgggcaaatctctaatggcgatgtcattgtcactaactttgaatatgcctatgactcgaccctgatgggggaagtcacgtgtgctgaaaagcagtgttacaagctggcgctggtgcgtaaatcggcggatatcacctggccgaaggttatctattacgttgaaaaagacggtgataatcgcccgtggaaggcggcctattattcgcaggatgaccagttaataaaagaagtgttgtatcaggatttccagccggtgttggggaaaacgcgacccatgaaaataaccgttaccgatgttcgtcacggcaataactattcagtgatggagtacagcgatgttcgtctggaatcgctgccggagtttcatttcaccaaagagtatattcagcgaggtgcgaaatgaaacgtacgctgaanatctcttcgttgctgtgtgttgcgctgccgttgacggtacaggcggattgcctgtcaggtgacgaggtggcacaaaacagcgatgtgacgctttacgagcaggtgtcttatgtcaataaacaggcttcggcctggcagattgcaggcaaaaatccctacacccgtcacaacggttatcaggaggcggggattggcatcaatagcggttgttcgataatcgacaatacgctggaccttaagctcaatctgtatggaataaacgaatatgcgcttaaacccgcagggaaattcgaaacggatgatagccgcacgnnnnnnnnaattaaccgcctcagtctggtctatagcgcctcggacagcgttcaatttgaagcaggcanntttgccgcgccgtcaggaatgttctttttgcgttcgccttctgatttgcaaacgcattattacaccggattccagtcgacgcgtttgcacgatcccaaaatgacatcggcgtatcaggcgtcatcgtggggcgcaaaaatgagcgtggatacacgcgattatgcgttttcggcgagtgtcataccgaagttagccaccatcgacaaacgctatgtgacgtctggcaactggtcggctaatcagcagggaaacagcgacgaagcctatctgctgagcttcagcgatcatcgctttggtgagcacacgccgacagtcaatgtgcggctcggaccatcgccgtcactcgcgctgtctgacagttatcactacaccccgcagcttacgctgaatgtcgacgcagcctaccaccgctcccagcaatggcggcatctttcccaccgtgagacggcgcaggtcgaggaatatcagtttccggattcgctctatgaaacgaaagatgaaagcggcgtggagctggcgctgggtgggcagtacaccagtgataatttcagcgtgtttggcgttgagtattactttcagagcgagggttattcgcgcgctgaacagcgtcagcagcgcgagttaattgacttcctcaataccacaaccggctatgcgccactggatcaggcatttgattcttacaaatacctgatggcttcagaaatcagcaataccgccaatcaggggatgctgcagggtaagcactatctgaacgcctgggccagtctgccgctggcgggagagtcgacnctgcagccttcgctggtggtgaatctcgttgatggcagcacgttgctgggcctgcattattccacgccgctcagcgctataagtaaccagcttgaagcctatgccggtggctatagcgcgctgggaagtcggtactccgaatttgcgctttttggcgacacgttaggcctttatttgggctttaaatactatctataaggataaagagatgatgaataatgcttcacaaccgacagtactgctttttgccggtcagggtaatccggttattggtatgggcagcgatctttgggatctcaacgccagtacaaaacatatctgggattgtgccagcgatatttccggactgaacctgcgtcgcctgtgtcagaaagggccgatgaatcgccttattcaaacgacggtacaacaactggcggtgaccgcaattaatgtaacgctctataccctgtgccgcgagcgtcttgagaatttaacggttgtgggctcctgcggacacagcgttggtgaatacagtgcgctctacgccgctggagctatttctcttgagacgctatttggcatgattcacttcagagccagcctgatgcatgacgaaagccagagaaataaaggcgcaatgctggcggttaaaggcatcaaccgcgaacaactgcagacgatgattacggaatcaggcattgcgctggatattagctgtgataacacgccgcgccagcaggttattgggggaacgcaggctgcgttgaatgaatttgccacgctgctgatggccgctggatacgaaccggttaaactcggtgtgagcggtgcctggcacacgcgtttgatggaagacggcgttcaggcaatgcgcgattatcttgccggactggatatcgcttcgccagagcatcaggttctgatgaacgtaacagcaaaaagcgaggtcgctccgtcaattatcaaagaaaatctctcattacacttaactcatacggtgaaatggactgaatctctcgatacatttctgaatatgccaacctcggtagctttccttgaaataagtaataagccctatttggggaatatgttcaacgatttcgctggcgtggatcagcaacgagttatgcattgtcgtaaagcatttagtgatgcgaaggtattcaaatgattcctgattatttaacttttattcgctttcaggataaacgaagtctgatatacatttatgctattggacttattctgataggcttttattggaaaaatgcaggatttacttttccatcagaggatattggtgtcgttagtgggattctggccctagtgctgtataattttatttttgatctcaaggcgtactgggcttataaatgcgtcacgaagaatatcgatttttcgtggtttaagaaaaagcagaaccacaaaatagaattatttcttacgcaacctctggtggcaggatttctgtcgttaatcatgttgagtacaatgagttgggggctataccagcgtctaccctcgttatatgcgctgttcctgatttcgttacttgggccgttggttatctttctgctgtttcggatgatccgcaccagttatgtcaagcaggtcgctatttcagtnnnnaaaaaagtaaaatataaaagtctgactcgctatgtgctgctttcggtgtgcatctcaacggttgttaacctgcttactatcagcccgttgcgtaacagagattcttttgtgatagaggggcagtggttaacgtttaaatcgataattgcattgctcattctttgtggcgtagtgttggcgattaatctgttttttctgcgcttctccaggcggtacgcttttttgggcaggctttttttgcaggaaatcgatctctttttctccagtgaaaatgcattgtcgaccttttttgccaagccgctttggcttcggttattcatattgctggttattgaagtgatgtggattacgctggtgtcggtattggcaacgcttgtggaatggcggatttggtttgaagcctattttttactctgctatgtaccgtgcttaatttactattttttctattgtcgattcctctggcataacgattttatgatggcatgtgacatgtatttccgttgggggcattttaataagtgaggaagtgataggaagtgaccagataatacatatatgttctgtactctcttgcgcattttgattgttgactgagcaaccagacagttgatgtgcacgatttcccctcgcccaaacagacgtgggcgggggcacccggtgtgtgcaatatacgaaaaaaaagcccgtactttcgtacgagctcttctttaaatatggcggtgagggggggattcgaacccccgatacgttgccgtatacacactttccaggcgtgctccttcagccactcggacacctcaccaaattgtcgttcctgtcttgctggaacgggcgctaatttagggaaatcatgacctgaggtcaacaaactttnnnnnnnnnnnnnnnnnnnnnnnnnnnnnnnnnnnnnnnntttattcaaacttcaatcaatatgcagttttaataagcaaaatctgctttttttgccaccgaccacggatttgttatgctggtggtctttgtagatcataacgataagtgcgaataaatttcgcacaacgcttttcgggagtcagtatggatatcatcttttatcacccaacgttcgatacccaatggtggatagaggcactgcgcaaagctattcctcaggcaagagtcagagcatggaaaagcggagataatgactctgctgattatgctttagtctggcatcctcctgttgaaatgctggcagggcgcgatcttaaagcggtgttcgcactcggggccggtgttgattctattttgagcaagctacaggcacaccctgaaatgctgaagccttctgttccactttttcgcctggaagataccggtatgggcgagcaaatgcaggaatatgctgtcagtcaggtgctgcattggtttcgacgttttgacgattatcgcatccagcaaaatagttcgcattggcaaccgctgcctgaatatcatcgggaagattttaccatcggcattttgggcgcaggcgtactgggcagtaaagttgctcagagtctgcaaacctggcgctttccgctgcgttgctggagtcgaacccgtaaatcgtggcctggcgtgcaaagctttgccggacgggaagaactgtctgcatttctgagccaatgtcgggtattgattaatttgttaccgaatacccctgaaaccgccggcattattaatcaacaattactcgaaaaattaccggatggcgcgtatctcctcaacctggcgcgtggtgttcatgtcgtggaagatgacctgctcgcggcgctggatagcggcaaagttaaaggcgcaatgttggatgtttttaatcgtgaacccttaccgcctgaaagtccgctctggcaacatccacgcgtgacgataacaccacatgtcgccgcgattacccgtcccgctgaagctgtggagtacatttctcgcactattgcccagctcgaaaaaggggagagggtctgcgggcaagtcgaccgcgcacgcggctactaataaagcatcaggattcctgctatccttggcgggaattgaatacaggagagagttatgtatcccgtcgaccttcatatgcataccgttgccagcacacatgcatatagcacattgagtgattacattgcccaggccaaacaaaagggcattaaactttttgcgattaccgatcatggcccggacatggaagatgcgccgcatcactggcacttcattaacatgcgtatctggccgcgagtggttgatggggtagggatcctgcgcggcatcgaagctaacattaaaaatgttgatggtgaaattgattgcagcggtaaaatgtttgactcgctggatctgattattgccggttttcatgagccggtttttgcaccacatgacaaagcgaccaatacacaagcgatgatcgccactatcgccagcggcaatgtgcatataataagccatcccggaaatccgaaatatgagatagatgttaaagccgttgctgaagcagccgcgaaacatcaggtggcgctggaaatcaataattcctcatttttacactcacgtaagggcagtgaagacaactgtcgtgcggtagccgcagcggtacgtgatgctggaggttgggtggcattaggctcggattctcacaccgcgtttaccatgggggaatttgaagagtgtcttaaaatcctcgacgcggtagattttccgccagagcgcattttgaatgtttctccgcgccgcttactgaacttccttgaatctcgcggtatggcaccgattgcggaatttgcagacctttaattactagtaatggaaatatattaatgaacgagttttctatcctctgtcgtgtgctgggttcgctctattaccgccaaccgcaagatcctttactggtgccgctgtttaccctgattcgtgaggggaaactggctgcgaactggccactggagcaggatgagttgctgacacgtttgcagaaaagctgtgatatgacgcaagtctctgccgattacaatgcgttgtttatcggcgatgaatgtgccgtgccgccatatcgtagcgcatgggttgaggacgcaacggaagcggaagtgcgngcttttctttctgaacgagggatgccattagcggatacgcctgccgatcacatcggcacattgctgcttgcggcttcctggctggaagatcagtcaacggaagatgagagcgaagcactggaaacactgttcagtgagtatctgttaccctggtgtggtgcgttccttggcaaagtggaggcccatgcaaccacgcctttctggcgcaccatggcaccgctaacccgcgatgccattagtgcaatgtgggacgagctggaagaagattctgaagagtaaatgtgatatgcgtcactcataactgcnacagataatttgctgttgcataaaatgtgtgctcgatctcattcatggccgcgttttctgctatcatgcgcggcatgaacatacttctctctattgcaatcacaacaggcattctctccggtatctggggatgggtggctgtttccctgggcttactaagctgggcgggcttcctgggctgtacggcctactttgcctgcccgcaaggtgggctgaaagggctggcgatctccgctgcaactctgcttagtggcgtggtgtgggcgatggtcattatttacggtagtgcactggcgccacatctggaaattctcagttatgtcataaccggtattgtcgcgtttctgatgtgtattcaggccaaacagctgctgctttcatttgttccggggacgtttataggcgcatgcgcgacgtttgccgggcagggtgactggaaactggtgttaccttcgctggcgcttgggctgatatttggttacgcaatgaaaaacagcggcctgtggctggcggcgcgtagtgcaaagacggctctccgtgagcaggaaatcaaaaataaagcgtgaggggcactcacgctttcgcttaaacagtaaatgccggattattaattccggcatntttatctgtcaggattccggtggaaccgacatatggcggtatttcaccagaatgtcattctgccgttctgctttgttctgcaaatcccacagaccacggtcaataccatcattaatcaggaaaatgacccctgtttcgatagccgacatcaggcacagcataacgggttcgttcgaggtgtaacccacttccccttccagcaagcgctggtagtcaataaagcggaaaaccccggcctgaacttcataggaaagtatcgtcttactggtgttcaccgaggagaggatctcaccggtactcacattgacgacgcgcaggttcacggcaatctgatcgagctggtattgcgtgtcggcaccgatcccaaaatatcttgccccaaccccgccagatttgacattgctttcataaccgataatcgaaccttcaaccatgatatttgccgcagttaaagattgcagcgggattcggttattaatggcaaccgtgccgttttcttgtgccgcacgaataatcttgcgctcattaagcaggttttgtaagccctggcgctccagcggtataaaccagcgagaatctttcaatgccgtgaccagcatcgccgtggcgctttgcggaacagcagtggagaagttacttgccgggtagggtttaaattgcccggtttcgtcctgaatgttgtataccgaaacaaagatcttacccgtcggcgctggcagatgggtcaaatctttgtagctctgagcacgaggcattaatgtcggtctggcggcttctttaggcggggcggttaagcatccgctcagtaacatgacggcaaccaaaagaaataagcgctgcatgattattttccttatgaagctggggcttaaaaatcggttgagttattttgtaaacccgaaacctggatggtcgaggtttgtccggttttacgatctgtcacgttcaactgcaattgaccatcgcggttagcaatatcaacaatataatcgttggtcaccatgcggcccggtttaccggtattaatattcgacagtagcccacctaaaatttgtgactggatggcctgagtaaagttatctaacgctgagggtgtttcaataccaaagtcatcgttatagctcggatctttataagagttttgggcctgagcgctatttnnnnnnnnnnnnnnnnnnnttgggttaccaccaaagtttggattacggaactggaaagtcatggttccagcccaacttaatggcgaaataagcatgagtagaactactgcatgtttgacacgcattgcagcctccgaacaattttttatttagaattcatcatgcgccaaatcgcccgtacttaataacgcctgatttatctggcgacgatttagtgcttcttcagtttgaatcagtgcaaagacgacagttttttcgaagtctcttttcaacgggaataaaaaagtctggaaaataacgtcctgattgaccgttattgtgatccagcttccccatcgtgcactgggcctttcattaatcgttaagttacccgtatagtcactttcccatttatcactaaaggctcggtaaaaatcatggccaatagatgaaacagtatggtcagttaacaatcccgggacttctacctcaacggcgtgaagattccctgcggcgaacagaaattctgccgccacaatccagcgtaaataacgtttcatggctttatcgcctgaggttatcgtttgcccaggaaaccgcttgtgtccggttttttacggctatcttcttgaaaagattataaagatgcgttttaaccgtattttcgctgatgaacaacgaacgagcgatctcgttattagacgcgccgatacgcagcttattcaggatctctttttcccgatgagtaaggagggctgattccgtgctgttataacgatagttaccagaatgtgtaatcaggtaactggcaagcttttgcgtaaagtagcattcgccgcgcaggacgccttgcaatccattgacaacgcgttcttgatcctccatggcataaaaaacgccgttgatatgaggccagttttcaatgtcgcggtacgggtaatcttcaggcgtatttagcaacaatattttgatattgttgtttttcctgctcaaagtatcctgccaataatggataagctttttatccgcttccatcatatccagaagaataatagagcctgaagagatatcgtccagagaacgttgaatattatgtaattttcctgtaattgccagcgattgtttaaggtgctgcaagagagctgtcgcctgcaaagaaggtttagtgatcaacaataatgtatgaccatgaatactatggacttcattaaacatgatgaaaccccgctttttttattgatcgcacacctgacagctgcctctaaaatagaagcaccagaagtactgacagatgttgcactgctgtgtgtagtaataaatcagccctaaatgggtaaaatataaaactaatggattacatctgatttcaatctagccattacaaatcttaaatcaagtgttaaacatgtaactaaatgtaactggttatattaaaatgttaaccttaaggttttattaagtttagaaatgatagaaaagttgtacatttggtttttattgcacaattttaaaaaatcatacaaatggtgctaacttactaatnnnnnnntannaaaaatatttcggtgtagtcctttcgtcatgtaaaacgttcttgttttttctccacaccaccgtggacaattttttactgcaaaaagacgaggtttgtcacggcttgtgcgcaagacatatcgcagcaatcagcgacgggcaagaagaatgactgtctggtgttttttgctagcggaaaacggagatttaaaagaaaacaaaatattttttgcgtagataacagcgtatttacgtgggttttaatactttggtatgaacaaaaaaagaaaaatacaacgcgcgggtgagttattaaaaatatttccgcagacatactttccatcgtaacgcagcgttaacaaaatataggttgcgttaacaaccaagttgaaatgatttaatttcttaaatgtacgaccaggtccagggtgacaacatgaaaaacaaattgttatttatgatgttaacaatactgggtgcgcctgggattgcagccgcagcaggttatgatttagctaattcagaatataacttcgcggtaaatgaattgagtaagtcttcatttaatcaggcagccataattggtcaagctgggactaataatagtgctcagttacggcagggaggctcaaaacttttggcggttgttgcgcaagaaggtagtagcaaccgggcaaagattgaccagacaggagattataaccttgcatatattgatcaggcgggcagtgccaatgatgccagtatttcgcaaggtgcttatggtaatactgcgatgattatccagaaaggttctggtaataaagcaaatattacacagtatggtactcaaaaaacggcaattgtagtgcagagacagtcgcaaatggctattcgcgtgacacaacgttaatttccattcgacttttaaatcaatccgatgggggttttacatgaaacttttannnntagcagcaattgcagcaatcgtattctccggtagcgctctggcaggtgttgttcctcagtacggcggcggtggcggtaaccacggtggtggcggtaataacagcggcccgaattcagagctgaatatttatcagtacggtggtggtaactctgcacttgctctgcaagctgatgctcgtaactctgatcttactattacccagcatggtggtggtaacggtgcagatgttggtcagggctcagatgacagctcaatcgatctgacccaacgtggctttggtaacagcgccactcttgatcagtggaacggtaaagactctcatatgacagttaaacaattcggtggcggcaacggtgcagcggttgaccagactgcatctaattccaccgtcaacgtaactcaggttggctttggtaacaacgcgaccgctcatcagtactaatacatcatctgtattaaagaaacagggcgcaagccctgttttttttcgggagaagaatatgaatgcgttattactccttgcggcactttccagtcagataacctttaatacgacccagcaaggggatatgtacaccattattcctgaagtcactcttactcaatcttgtctgtgcagagtacaaatattgtccctgcgcgaaggcagttcagggcaaagtcagacgaagcaagaaaagaccctttcattgcctgctaatcaacccattgctttgacgaagttgagtttaaatatttccccggacgatcgggtgaaaatagttgttactgtttctgatggacagtcacttcatttatcacaacaatggccgccctcttcagaaaagtcttaatttgttgaaatatcgagcataagatgaatctggagagaatggtctgctgcgaatcagccaacctgaaagtatggataacacaaccctcaaggatgactaatcattgaggaaatagaataaatgttcagaccttttttaaactctcttatgctcggcagtttgttttttccttttattgccatcgcaggaagcaccgcgcaagggggcgtgatccatttttatggccaaattgtggaaccggcatgtgacgtcagcacccagtcatcacccgtagaaatgaactgcccacagaatggttctgttccgggtaaaacctactccagcaaagcgttaatgagcggcaatgtcaaaaacgcgcaaatagcctcagtaaaagtgcagtatcttgataaacagaaaaagctggctgtaatgaacatcgaatataactaagtttctgaacaactcacgttgctgagcagaaaaatgcgatttaaccaaaaagcctgctgtacacttaagaaacaagaaggtgtaaggaggcgttatgaaaacgcgtattcatgttgtgcagggtgatattaccaaactggccgttgatgtgattgtgaatgcggctaatccttcattaatgggaggtggcggcgtcgatggggccattcatcgcgcagcgggtccggccctgctggatgcttgtttaaaagtcaggcaacagcagggcgattgccctacggggcatgccgttattacgcttgcaggcgatcttcctgctaaagccgtagtgcacaccgtcgggccagtctggcgtggtggtgaacaaaacgaagaccagcttttgcaggatgcctatctcaatagcctacgactggtggcggcaaacagctatacgtcagtggcttttcctgcaatcagtactggggtttatggttaccctcgtgcggcagcggctgaaatcgcagtaaaaaccgtttcagaatttattacccgtcacgctttacccgaacaggtatactttgtctgttatgatgaagaaaacgcccacctctacgaaagactccttacccaacaaggagatgaatgatttgccccggctggcgagcgcggtgctgccactgtgttcgcaacatcccggtcagtgtggtcttttccctctggagaaaagtctggatgcgtttgccgcccggtatcgtctggccgaaatgtcagagcatacgctggatgttcagtattacatctggcaggacgatatgtcgggtcggttactgttttccgccctgttagccgcagcaaagcgtggcgttcgcgtccgtttgttgctggacgacaacaatacgcccggacttgacgacattttacgcttgcttgacagccatccccgcattgaagtccggctttttaatcctttctcgtttcgcttgctgcgtccgcttggttatatcaccgacttttcccgtctcaatcgccgtatgcacaataaaagtttcactgtcgatggcgtggtgacgttggtaggggggcgaaatattggtgatgcctattttggggcaggggaagagccacttttttcggatttagatgtcatggcaataggacccgtagtagaggacgttgccgatgatttcgcccgctactggtattgcaaatcggtttcacccttacagcaggtgctggatgtcccggaaggtgaaatggcggatcgcatcgagttacccgcctcctggcataacgatgccatgacgcatcgttacttacgcaaaatggaatccagtccgtttataaatcatctggttgatggaacgttgccgcttatctgggcgaaaacacgtttattaagtgatgatccggcgaaaggggagggcaaggcaaaacggcattcactgttaccgcagcgcctgttcgatatcatgggctcacccagtgaacgcatcgatattatctcttcctattttgtaccgacacgcgcaggtgtggcgcaactcttacggatggtgagaaaangggtaaagattgcgatcctaaccaattctcttgccgctaacgatgttgctgtcgtccatgccggatacgcgcgctggcgcaaaaaattgctccgctatggcgtggaattatatgaactcaagccgacgcgtgaacaaagtagtacgttacacgatcgcggcataaccggtaattccggtgccagcctgcatgctaaaacctttagcatcgatggtaaaacggtgtttatcggttctttcaatttcgatccgcgttcaacattgctcaatactgaaatgggcttcgtgatagagagcgaaacgctggctcagttaattgataaacgctttattcagagccagtatgatgcggcctggcagctccgtctggacaggtggggacggatcaactgggttgatcgtcatgcaaagaaagagattgttctcaaaaaagaacccgctaccagtttctggaagcgggttatggtcagactggcgtcgatattgcccgtggaatggttattgtaaatgtggcttaacgggctggtgctttatcgttctcacgcttaacaaccggtttaccagagaacaaaaacttcagtaacgggatgcgcaaatgaatttcatacagaattatcgcaatccctactacgaatatcaggccacagagaaaaccaagccagttggaggtgatgtgcggtgtaatgtatgcnccgaaaaacagcgttaacgggtggtgaaccagatagataaacagcgatgcgttaacaaaataagtcacccgcgctgactggaagttaagcaaacggtggccaaaggagaagaccacattcaccatccacagaccgaggaccatggtgatcaccgactcggtttcgtacatccaggcatcgccactgccatagcgctggttgagtaaataagcgacaaacgccaatgctgcagcgagggtacagccacgagacggcgtggtaaacaaggctttaagatgagggaaaatgaaagccagtgcgccgaggataaagaacggtaaataaaatagcgtttgcatgacaataaaattgaacgtgccattactcagaatgggtggatacacaataaaaatcgttcttcttattaccgcataaccgatgccgaggcacaaaaaaatcaccgatagttttaccatcgagaattttttattcgttttatcagaattttctaaattatttctgatgcgtttaaatatccatacgcacagcgtcgtcatgaccactaacaccagtaaaaaccacagatgtgatattaattcccaggccaacgtattatatttgtcatacaatgacagcccaggccaactttccgctttccctttgacgtattgcagcataataaattgcggcaatgtcagtagggggatggctgttaacatcgggatccctacacgttcgacacgtactttccaccattttttcaagggatagcgtaaaaaaagcatgtaggaaaagtacccggatataacgaaaaatacctgcatgcggaacgagtggatgaagtcattaaaaagggtcagccacaatgacggttcggcgctattcacatgccatgtatggctcgaatagattaaagaaatatgaaaagggatccctaacaacatcagccaggcgcggatggagtcgangaaatattcacgttgcgcgggtactggattcatatatggttaactaatctcggatttttcgtcttatccctgtcgggttatgcctttaggcttgttgccatagcgacaccgacctgaccgcgccaggcgcaggcttcaagtttttatgcatagcatcatcgctaccactaaccagaatggaagcgtctgtaagacggttgataaanaaatttgctggcaaaccctacacgaagtcgatgcttctgtctttaggagaagcacggaaagtgaaaacggttgcaatcaggtgcttaatccatgagccagcgtgctgaacgataccgggattctgttgtcggaatggctggttatccattaaaatagatcggatcgatataagcacacaaagggggaagtgcttactaattatgaaacataaactacaaatgatgaaaatgcgttggttgagtgctgcagtaatgttaaccctgtatacatcttcaagctgggctttcagtattgatgatgtcgcaaagcaagctcaatccttagccgggaaaggctatgaggcgcccaaaagcaacttgccctccgttttccgcgatatgaaatacgcggactatcagcagatccagtttaatcatgacaaagcgtactggaacaatctgaagaccccattcaaactcgagttctaccatcagggtatgtacttcgataccccggtcaaaataaatgaagtgactgccaccgcagtcaaacgaatcaaatacagcccggattatttcactttcggcgatgttcagcatgacaaagacacggtaaaagaccttggttttgccggttttaaagtgc
